(19) United States
(12) Patent Application Publication
(10) Pub. No.: US 2014/0220641 A1
(43) Pub. Date: Aug. 7, 2014

(54) TRANSCRIPTION FACTORS FOR CELLULOSIC ENZYME PRODUCTION

(71) Applicants: Chaoguang Tian, Tianjin (CN); Teresa Shock, San Francisco, CA (US); N. Louise Glass, Berkeley, CA (US); Samuel Coradetti, Berkeley, CA (US); James Craig, Berkeley, CA (US)

(72) Inventors: Chaoguang Tian, Tianjin (CN); Teresa Shock, San Francisco, CA (US); N. Louise Glass, Berkeley, CA (US); Samuel Coradetti, Berkeley, CA (US); James Craig, Berkeley, CA (US)

(73) Assignee: The Regents of the University of California, Oakland, CA (US)

(21) Appl. No.: 14/233,735

(22) PCT Filed: Jul. 23, 2012
(86) PCT No.: PCT/US2012/047898

§ 371 Date: Apr. 3, 2014

Related U.S. Application Data
(60) Provisional application No. 61/510,466, filed on Jul. 21, 2011.

(51) Int. Cl. C12P 19/14; C12P 19/02; C12N 15/80

(52) U.S. Cl. CPC C12P 19/14; C12N 15/80; C12P 19/02
USPC 435/99; 435/471; 435/157; 435/160; 435/162

(57) ABSTRACT

Provided herein are methods and compositions for increasing the production of one or more cellulases from a fungal host cell. The disclosure is based, on the surprising discovery that mis-expression of the transcriptional regulator clr-2 in a filamentous fungal cell was able to induce expression of cellulase genes under non-inducing or starvation conditions, resulting in increased secretion of cellulases from the cell. Advantageously, mis-expression of the transcription factor clr-2 in a filamentous fungal cell cultured in the absence of cellulose or cellobiose results in increased secretion of cellulases. The disclosure relates inter alia to a method of degrading cellulose-containing material, to a method of increasing the production of one or more cellulases from a fungal cell and to a method of reducing the viscosity of a pretreated biomass material, by contacting pretreated biomass material with a fungal host cell containing at least one recombinant nucleic acid encoding clr-2 or a related transcription factor.

### CROSS-REFERENCE TO RELATED APPLICATIONS

[0001] This application claims the benefit of U.S. Provisional Application No. 61/510,466, filed Jul. 21, 2011, which is hereby incorporated by reference, in its entirety.

### SUBMISSION OF SEQUENCE LISTING AS ASCII TEXT FILE

[0002] The content of the following submission on ASCII text file is incorporated herein by reference in its entirety: a computer readable form (CRF) of the Sequence Listing (file name: 677792002140SeqList.txt, date recorded: Jul. 23, 2012, size: 978 KB).

### FIELD

[0003] The disclosure relates to the degradation of cellulose. In particular, the disclosure relates to polypeptides involved in the response of a cell to cellulose, and related nucleotides and compositions. The disclosure further relates to methods and uses of polypeptides, nucleotides, and compositions thereof involved in the response of a cell to cellulose.

### BACKGROUND

[0004] Liquid fuels derived from biomass have long been studied as alternatives to fossil fuels. While the net energy yield and greenhouse gas reduction achieved with current biofuel conversion processes remains controversial, biofuels produced from cellulosic feedstocks hold great potential as a source of renewable, carbon neutral liquid fuel. Current conversion processes rely heavily on enzymatic conversion of cellulose to glucose for fermentation to ethanol or other fuels. Production of these enzymes from filamentous fungi, or purchase from another party, represents a major cost in the total conversion process. Efforts to reduce this cost have been a major focus of recent public and private research on biofuel production.

[0005] The greatest advances in cellulase production to date have been achieved by iterative, random mutagenesis of filamentous fungi. While this strategy has reduced the cost of enzyme production substantially, the resultant strains have hundreds of mutations. It is not clear which mutations have given rise to the desired increase in yield and which mutations are irrelevant or impair cellulase production. Without a fundamental understanding of how particular mutations improve cellulase yield, it will be difficult to further engineer industrial strains or transfer increased productivity to other strains of interest. A more systematic understanding of the biological process involved in cellulase production by filamentous fungi, and related compositions and methods, are needed.

### BRIEF SUMMARY

[0006] In order to meet the above needs, the present disclosure provides novel methods and compositions for increasing the production of one or more cellulases from a fungal host cell. Moreover, the present disclosure is based, at least in part, on the surprising discovery that mis-expression of the transcriptional regulator clr-2 in a filamentous fungal cell was able to induce expression of cellulase genes under non-inducing or starvation conditions, resulting in increased secretion of cellulases from the cell. Advantageously, mis-expression of clr-2 in a filamentous fungal cell cultured in the absence of cellulose or cellobiose results in increased secretion of cellulases.

[0007] Accordingly, certain aspects of the present disclosure relate to a method of degrading cellulose-containing material, by: a) contacting cellulose-containing material with a fungal host cell containing at least one recombinant nucleic acid encoding a transcription factor protein, where the transcription factor protein contains a zinc(2)-cysteine(6) binuclear cluster domain, a PFAM04082 transcription factor domain, and at least one polypeptide sequence selected from SEQ ID NOs: 184, 185, 186, and 187; and b) incubating the fungal host cell and cellulose-containing material under conditions sufficient for the fungal host cell to degrade the cellulose-containing material. In certain embodiments, the transcription factor protein contains at least one additional polypeptide sequence selected from SEQ ID NOs: 184, 185, 186, and 187. In certain embodiments, the transcription factor protein contains at least two additional polypeptide sequences selected from SEQ ID NOs: 184, 185, 186, and 187. In certain embodiments, the transcription factor protein contains at least three additional polypeptide sequences selected from SEQ ID NOs: 184, 185, 186, and 187. In certain embodiments, the transcription factor protein contains SEQ ID NOs: 184, 185, 186, and 187.

[0008] Other aspects of the present disclosure relate to a method of degrading cellulose-containing material, by: a) contacting cellulose-containing material with a fungal host cell containing at least one recombinant nucleic acid encoding a transcription factor protein, where the transcription factor protein contains a zinc(2)-cysteine(6) binuclear cluster domain, a PFAM04082 transcription factor domain, and SEQ ID NO: 184; and b) incubating the fungal host cell and cellulose-containing material under conditions sufficient for the fungal host cell to degrade the cellulose-containing material. In certain embodiments, the transcription factor protein further contains SEQ ID NO: 185. In certain embodiments that may be combined with any of the preceding embodiments, the transcription factor further contains SEQ ID NO: 186. In certain embodiments that may be combined with any of the preceding embodiments, the transcription factor further contains SEQ ID NO: 185 and 186. In certain embodiments that may be combined with any of the preceding embodiments, the transcription factor further contains SEQ ID NO: 187. In certain embodiments that may be combined with any of the preceding embodiments, the transcription factor further contains SEQ ID NOs: 185 and 187. In certain embodiments that may be combined with any of the preceding embodiments, the transcription factor further contains SEQ ID NOs: 186 and 187. In certain embodiments that may be combined with any of the preceding embodiments, the transcription factor further contains SEQ ID NO: 185, 186, and 187.

[0009] Other aspects of the present disclosure relate to a method of degrading cellulose-containing material, by: a) contacting cellulose-containing material with a fungal host cell containing at least one recombinant nucleic acid encoding a transcription factor protein, where the transcription factor protein contains a zinc(2)-cysteine(6) binuclear cluster domain, a PFAM04082 transcription factor domain, and SEQ ID NOs: 184 and 185; and b) incubating the fungal host cell and cellulose-containing material under conditions sufficient for the fungal host cell to degrade the cellulose-containing material. In certain embodiments, the transcription factor protein further contains SEQ ID NO: 186. In certain embodiments that may be combined with any of the preceding embodiments, the transcription factor further contains SEQ ID NO: 187. In certain embodiments that may be combined with any of the preceding embodiments, the transcription factor further contains SEQ ID NO: 186 and 187.

[0010] Other aspects of the present disclosure relate to a method of degrading cellulose-containing material, by: a) contacting cellulose-containing material with a fungal host cell containing at least one recombinant nucleic acid encoding a transcription factor protein, where the transcription factor protein contains a zinc(2)-cysteine(6) binuclear cluster domain, a PFAM04082 transcription factor domain, and SEQ ID NOs: 184, 185, and 186; and b) incubating the fungal host cell and cellulose-containing material under conditions sufficient for the fungal host cell to degrade the cellulose-containing material. In certain embodiments, the transcription factor protein further contains SEQ ID NO: 187.

[0011] Other aspects of the present disclosure relate to a method of degrading cellulose-containing material, by: a) contacting cellulose-containing material with a fungal host cell containing at least one recombinant nucleic acid encoding a transcription factor protein, where the transcription factor protein contains a zinc(2)-cysteine(6) binuclear cluster domain, a PFAM04082 transcription factor domain, and SEQ ID NOs: 184, 185, 186, and 187; and b) incubating the fungal host cell and cellulose-containing material under conditions sufficient for the fungal host cell to degrade the cellulose-containing material.

[0012] In certain embodiments that may be combined with any of the preceding embodiments, the fungal host cell is incubated under conditions sufficient for the fungal host cell to express the transcription factor protein. In certain embodiments that may be combined with any of the preceding embodiments, the fungal host cell produces a greater amount of one or more cellulases than a corresponding fungal host cell lacking the at least one recombinant nucleic acid. In certain embodiments that may be combined with any of the preceding embodiments, the cellulose-containing material contains biomass. In certain embodiments, the biomass is subjected to pretreatment prior to being contacted with the fungal host cell. In certain embodiments, the pretreatment contains one or more treatments selected from ammonia fiber expansion (AFEX), steam explosion, treatment with high temperature, treatment with high pressure, treatment with alkaline aqueous solutions, treatment with acidic solutions, treatment with organic solvents, treatment with ionic liquids (IL), treatment with electrolyzed water, and treatment with phosphoric acid. In certain embodiments that may be combined with any of the preceding embodiments, the biomass contains a plant material. In certain embodiments, the plant material is selected from Miscanthus, switchgrass, cord grass, rye grass, reed canary grass, elephant grass, common reed, wheat straw, barley straw, canola straw, oat straw, corn stover, soybean stover, oat hulls, sorghum, rice hulls, sugarcane bagasse, corn fiber, Distillers Dried Grains with Solubles (DDGS), Blue Stem, corncobs, pine wood, birch wood, willow wood, aspen wood, poplar wood, and energy cane. In certain embodiments that may be combined with any of the preceding embodiments, the fungal host cell further contains one or more recombinant nucleic acids that encode a polypeptide involved in a biochemical pathway for the production of at least one biofuel. In certain embodiments, the method further includes incubating the fungal host cell with the degraded cellulose-containing material under conditions sufficient for the fungal host cell to convert the cellulose-containing material to at least one biofuel. In certain embodiments that may be combined with any of the preceding embodiments, the biofuel is selected from ethanol, n-propanol, n-butanol, iso-butanol, 3-methyl-butanol, 2-methyl-1-butanol, 3-methyl-1-pentanol, and octanol. In certain embodiments that may be combined with any of the preceding embodiments, the degraded cellulose-containing material is cultured with a fermentative microorganism under conditions sufficient to produce at least one fermentation product from the degraded cellulose-containing material.

[0013] Other aspects of the present disclosure relate to a method of increasing the production of one or more cellulases from a fungal cell, by: (a) providing a fungal host cell containing at least one recombinant nucleic acid encoding a transcription factor protein, where the transcription factor protein contains a zinc(2)-cysteine(6) binuclear cluster domain, a PFAM04082 transcription factor domain, and at least one polypeptide sequence selected from SEQ ID NOs: 184, 185, 186, and 187; and (b) culturing the host cell under conditions sufficient to support the expression of the at least one recombinant nucleic acid, where the fungal host cell produces a greater amount of the one or more cellulases than a corresponding host cell lacking the at least one recombinant nucleic acid. In certain embodiments, the transcription factor protein contains at least one additional polypeptide sequence selected from SEQ ID NOs: 184, 185, 186, and 187. In certain embodiments, the transcription factor protein contains at least two additional polypeptide sequences selected from SEQ ID NOs: 184, 185, 186, and 187. In certain embodiments, the transcription factor protein contains at least three additional polypeptide sequences selected from SEQ ID NOs: 184, 185, 186, and 187. In certain embodiments, the transcription factor protein contains SEQ ID NOs: 184, 185, 186, and 187. In certain embodiments, the fungal host cell is cultured in the absence of cellulose.

[0014] Other aspects of the present disclosure relate to a method of increasing the production of one or more cellulases from a fungal cell, by: (a) providing a fungal host cell containing at least one recombinant nucleic acid encoding a transcription factor protein, where the transcription factor protein contains a zinc(2)-cysteine(6) binuclear cluster domain, a PFAM04082 transcription factor domain, and SEQ ID NO: 184; and (b) culturing the host cell under conditions sufficient to support the expression of the at least one recombinant nucleic acid, where the fungal host cell produces a greater amount of the one or more cellulases than a corresponding host cell lacking the at least one recombinant nucleic acid. In certain embodiments, the transcription factor protein further contains SEQ ID NO: 185. In certain embodiments that may be combined with any of the preceding embodiments, the transcription factor further contains SEQ ID NO: 186. In certain embodiments that may be combined with any of the preceding embodiments, the transcription factor further contains SEQ ID NO: 185 and 186. In certain embodiments that may be combined with any of the preceding embodiments, the transcription factor further contains SEQ ID NO: 187. In certain embodiments that may be combined with any of the preceding embodiments, the transcription factor further contains SEQ ID NOs: 185 and 187. In certain embodiments that may be combined with any of the preceding embodiments, the transcription factor further contains SEQ ID NOs: 186 and 187. In certain embodiments that may be combined with any of the preceding embodiments, the transcription factor further contains SEQ ID NO: 185, 186, and 187. In certain embodiments, the fungal host cell is cultured in the absence of cellulose.

[0015] Other aspects of the present disclosure relate to a method of increasing the production of one or more cellulases from a fungal cell, by: (a) providing a fungal host cell containing at least one recombinant nucleic acid encoding a transcription factor protein, where the transcription factor protein contains a zinc(2)-cysteine(6) binuclear cluster domain, a PFAM04082 transcription factor domain, and SEQ ID NOs: 184 and 185; and (b) culturing the host cell under conditions sufficient to support the expression of the at least one recombinant nucleic acid, where the fungal host cell produces a greater amount of the one or more cellulases than a corresponding host cell lacking the at least one recombinant nucleic acid. In certain embodiments, the transcription factor protein further contains SEQ ID NO: 186. In certain embodiments that may be combined with any of the preceding embodiments, the transcription factor further contains SEQ ID NO: 187. In certain embodiments that may be combined with any of the preceding embodiments, the transcription factor further contains SEQ ID NO: 186 and 187. In certain embodiments, the fungal host cell is cultured in the absence of cellulose.

[0016] Other aspects of the present disclosure relate to a method of increasing the production of one or more cellulases from a fungal cell, by: (a) providing a fungal host cell containing at least one recombinant nucleic acid encoding a transcription factor protein, where the transcription factor protein contains a zinc(2)-cysteine(6) binuclear cluster domain, a PFAM04082 transcription factor domain, and SEQ ID NOs: 184, 185, and 186; and (b) culturing the host cell under conditions sufficient to support the expression of the at least one recombinant nucleic acid, where the fungal host cell produces a greater amount of the one or more cellulases than a corresponding host cell lacking the at least one recombinant nucleic acid. In certain embodiments, the transcription factor protein further contains SEQ ID NO: 187. In certain embodiments, the fungal host cell is cultured in the absence of cellulose.

[0017] Other aspects of the present disclosure relate to a method of increasing the production of one or more cellulases from a fungal cell, by: (a) providing a fungal host cell containing at least one recombinant nucleic acid encoding a transcription factor protein, where the transcription factor protein contains a zinc(2)-cysteine(6) binuclear cluster domain, a PFAM04082 transcription factor domain, and SEQ ID NOs: 184, 185, 186, and 187; and (b) culturing the host cell under conditions sufficient to support the expression of the at least one recombinant nucleic acid, where the fungal host cell produces a greater amount of the one or more cellulases than a corresponding host cell lacking the at least one recombinant nucleic acid. In certain embodiments, the fungal host cell is cultured in the absence of cellulose.

[0018] In certain embodiments that may be combined with any of the preceding embodiments, the at least one recombinant nucleic acid encodes a clr-2 transcription factor protein. In certain embodiments that may be combined with any of the preceding embodiments, the at least one recombinant nucleic acid is SEQ ID NO: 5 or SEQ ID NO: 165. In certain embodiments that may be combined with any of the preceding embodiments, the at least one recombinant nucleic acid is operatively linked to a promoter selected from ccg-1, gpd-1, vvd, qa-2, pdA, trpC, tef-1, and xlr-1.

[0019] In certain embodiments that may be combined with any of the preceding embodiments, the fungal host cell further contains at least one additional recombinant nucleic acid encoding an additional transcription factor protein, where the additional transcription factor protein contains a zinc(2)-cysteine(6) binuclear cluster domain, a PFAM04082 transcription factor domain, and at least one polypeptide sequence selected from SEQ ID NOs: 188, 189, 190, 191, and 192. In certain embodiments, the additional transcription factor protein contains at least one additional polypeptide sequence selected from SEQ ID NOs: 188, 189, 190, 191, and 192. In certain embodiments, the additional transcription factor protein contains at least two additional polypeptide sequences selected from SEQ ID NOs: 188, 189, 190, 191, and 192. In certain embodiments, the additional transcription factor protein contains at least three additional polypeptide sequences selected from SEQ ID NOs: 188, 189, 190, 191, and 192. In certain embodiments, the additional transcription factor protein contains at least four additional polypeptide sequences selected from SEQ ID NOs: 188, 189, 190, 191, and 192. In certain embodiments, the additional transcription factor protein contains SEQ ID NOs: 188, 189, 190, 191, and 192. In certain embodiments that may be combined with any of the preceding embodiments, the fungal host cell further contains at least one additional recombinant nucleic acid encoding an additional transcription factor protein, where the additional transcription factor protein contains a zinc(2)-cysteine(6) binuclear cluster domain, a PFAM04082 transcription factor domain, and SEQ ID NO: 188. In certain embodiments, the additional transcription factor protein further contains SEQ ID NO: 189. In certain embodiments that may be combined with any of the preceding embodiments, the additional transcription factor further contains SEQ ID NO: 190. In certain embodiments that may be combined with any of the preceding embodiments, the additional transcription factor further contains SEQ ID NO: 189 and 190. In certain embodiments that may be combined with any of the preceding embodiments, the additional transcription factor further contains SEQ ID NO: 191. In certain embodiments that may be combined with any of the preceding embodiments, the additional transcription factor further contains SEQ ID NOs: 189 and 191. In certain embodiments that may be combined with any of the preceding embodiments, the additional transcription factor further contains SEQ ID NOs: 190 and 191. In certain embodiments that may be combined with any of the preceding embodiments, the additional transcription factor further contains SEQ ID NO: 192. In certain embodiments that may be combined with any of the preceding embodiments, the additional transcription factor further contains SEQ ID NOs: 189 and 192. In certain embodiments that may be combined with any of the preceding embodiments, the additional transcription factor further contains SEQ ID NOs: 190 and 192. In certain embodiments that may be combined with any of the preceding embodiments, the additional transcription factor further contains SEQ ID NOs: 191 and 192. In certain embodiments that may be combined with any of the preceding embodiments, the additional transcription factor further contains SEQ ID NO: 189, 190, 191, and 192. In certain embodiments that may be combined with any of the preceding embodiments, the at least one additional recombinant nucleic acid encodes a clr-1 transcription factor protein. In certain embodiments that may be combined with any of the preceding embodiments, the at least one additional recombinant nucleic acid encoding the additional transcription factor is SEQ ID NO: 2, SEQ ID NO: 119, or SEQ ID NO: 183. In certain embodiments that may be combined with any of the preceding embodiments, the at least one additional recombinant nucleic acid is operatively linked to a promoter selected from ccg-1, gpd-1, vvd, qa-2, pdA, trpC, tef-1, and xlr-1.

[0020] In certain embodiments that may be combined with any of the preceding embodiments, the fungal host cell further contains at least one recombinant nucleic acid encoding a hemicellulase. In certain embodiments that may be combined with any of the preceding embodiments, the fungal host cell is selected from Neurospora crassa, Metarhizium anisopliae, Gibberella zeae, Nectria haematococca, Magnaporthe oryzae, Neurospora tetrasperma, Sordaria macrospora, Chaetomium globosum, Podospora anserina, Verticillium albo-atrum, Glomerella graminicola, Grosmannia clavigera, Sclerotinia sclerotiorum, Botryotinia fuckeliana, Aspergillus oryzae, Aspergillus nidulans, Aspergillus niger, Aspergillus fumigatus, Penicillium chrysogenum, Leptosphaeria maculans, Phaeosphaeria nodorum, Pyrenophora tritici-repentis, Pyrenophora teres, Penicillium marneffei, Talaromyces stipitatus, Trichoderma reesei, Uncinocarpus reesii, Coccidioides immitus, Coccidioides posadasii, Saccharomyces cerevisiae, Schizosaccharomyces pombe, Sporotrichum thermophile (Myceliophthora thermophila), Thielavia terrestris-thermophilic, Acremonium cellulolyticus, Yarrowia lipolytica, Hansenula polymorpha, Kluyveromyces lactis, Pichia pastoris, Mycosphaerella graminicola, Neosartorya fischeri, Thermomyces lanuginosus (Humicola brevis, Humicola brevispora, Humicola grisea, Humicola lanuginosa, Monotospora lanuginosa, Sepedonium lanuginosum), Talaromyces thermophilus (Talaromyces dupontii, Penicillium dupontii), and Chrysosporium lucknowense.

[0021] Other aspects of the present disclosure relate to a method of reducing the viscosity of a pretreated biomass material, by contacting pretreated biomass material with a fungal host cell containing at least one recombinant nucleic acid encoding a transcription factor protein, to yield a pretreated biomass material having reduced viscosity, where the transcription factor protein contains a zinc(2)-cysteine(6) binuclear cluster domain, a PFAM04082 transcription factor domain, and at least one polypeptide sequence selected from SEQ ID NOs: 184, 185, 186, and 187. In certain embodiments, the transcription factor protein contains at least one additional polypeptide sequence selected from SEQ ID NOs: 184, 185, 186, and 187. In certain embodiments, the transcription factor protein contains at least two additional polypeptide sequences selected from SEQ ID NOs: 184, 185, 186, and 187. In certain embodiments, the transcription factor protein contains at least three additional polypeptide sequences selected from SEQ ID NOs: 184, 185, 186, and 187. In certain embodiments, the transcription factor protein contains SEQ ID NOs: 184, 185, 186, and 187. In certain embodiments, the at least one additional recombinant nucleic acid encodes a clr-2 transcription factor protein. In certain embodiments, the at least one recombinant nucleic acid is SEQ ID NO: 5 or SEQ ID NO: 165. In certain embodiments that may be combined with any of the preceding embodiments, the fungal host cell further contains at least one additional recombinant nucleic acid encoding an additional transcription factor, where the additional transcription factor protein contains a zinc(2)-cysteine(6) binuclear cluster domain, a PFAM04082 transcription factor domain, and at least one, at least two, at least three, at least four, or at least five polypeptide sequences selected from SEQ ID NOs: 188, 189, 190, 191, and 192. In certain embodiments, the at least one additional recombinant nucleic acid encodes a clr-1 transcription factor protein. In certain embodiments, the at least one additional recombinant nucleic acid encoding the additional transcription factor protein is SEQ ID NO: 2, SEQ ID NO: 119, or SEQ ID NO: 183.

[0022] Other aspects of the present disclosure relate to a method of reducing the viscosity of a pretreated biomass material, by contacting pretreated biomass material with a fungal host cell containing at least one recombinant nucleic acid encoding a transcription factor protein, to yield a pretreated biomass material having reduced viscosity, where the transcription factor protein contains a zinc(2)-cysteine(6) binuclear cluster domain, a PFAM04082 transcription factor domain, and SEQ ID NO: 184. In certain embodiments, the transcription factor protein further contains SEQ ID NO: 185. In certain embodiments that may be combined with any of the preceding embodiments, the transcription factor further contains SEQ ID NO: 186. In certain embodiments that may be combined with any of the preceding embodiments, the transcription factor further contains SEQ ID NO: 185 and 186. In certain embodiments that may be combined with any of the preceding embodiments, the transcription factor further contains SEQ ID NO: 187. In certain embodiments that may be combined with any of the preceding embodiments, the transcription factor further contains SEQ ID NOs: 185 and 187. In certain embodiments that may be combined with any of the preceding embodiments, the transcription factor further contains SEQ ID NOs: 186 and 187. In certain embodiments that may be combined with any of the preceding embodiments, the transcription factor further contains SEQ ID NO: 185, 186, and 187. In certain embodiments, the at least one additional recombinant nucleic acid encodes a clr-2 transcription factor protein. In certain embodiments, the at least one recombinant nucleic acid is SEQ ID NO: 5 or SEQ ID NO: 165. In certain embodiments that may be combined with any of the preceding embodiments, the fungal host cell further contains at least one additional recombinant nucleic acid encoding an additional transcription factor, where the additional transcription factor protein contains a zinc(2)-cysteine(6) binuclear cluster domain, a PFAM04082 transcription factor domain, and at least one, at least two, at least three, at least four, or at least five polypeptide sequences selected from SEQ ID NOs: 188, 189, 190, 191, and 192. In certain embodiments, the at least one additional recombinant nucleic acid encodes a clr-1 transcription factor protein. In certain embodiments, the at least one additional recombinant nucleic acid encoding the additional transcription factor protein is SEQ ID NO: 2, SEQ ID NO: 119, or SEQ ID NO: 183.

[0023] Other aspects of the present disclosure relate to a method of reducing the viscosity of a pretreated biomass material, by contacting pretreated biomass material with a fungal host cell containing at least one recombinant nucleic acid encoding a transcription factor protein, to yield a pretreated biomass material having reduced viscosity, where the transcription factor protein contains a zinc(2)-cysteine(6) binuclear cluster domain, a PFAM04082 transcription factor domain, and SEQ ID NOs: 184 and 185. In certain embodiments, the transcription factor protein further contains SEQ ID NO: 186. In certain embodiments that may be combined with any of the preceding embodiments, the transcription factor further contains SEQ ID NO: 187. In certain embodiments that may be combined with any of the preceding embodiments, the transcription factor further contains SEQ ID NO: 186 and 187. In certain embodiments, the at least one additional recombinant nucleic acid encodes a clr-2 transcription factor protein. In certain embodiments, the at least one recombinant nucleic acid is SEQ ID NO: 5 or SEQ ID NO: 165. In certain embodiments that may be combined with any of the preceding embodiments, the fungal host cell further contains at least one additional recombinant nucleic acid encoding an additional transcription factor, where the additional transcription factor protein contains a zinc(2)-cysteine(6) binuclear cluster domain, a PFAM04082 transcription factor domain, and at least one, at least two, at least three, at least four, or at least five polypeptide sequences selected from SEQ ID NOs: 188, 189, 190, 191, and 192. In certain embodiments, the at least one additional recombinant nucleic acid encodes a clr-1 transcription factor protein. In certain embodiments, the at least one additional recombinant nucleic acid encoding the additional transcription factor protein is SEQ ID NO: 2, SEQ ID NO: 119, or SEQ ID NO: 183.

[0024] Other aspects of the present disclosure relate to a method of reducing the viscosity of a pretreated biomass material, by contacting pretreated biomass material with a fungal host cell containing at least one recombinant nucleic acid encoding a transcription factor protein, to yield a pretreated biomass material having reduced viscosity, where the transcription factor protein contains a zinc(2)-cysteine(6) binuclear cluster domain, a PFAM04082 transcription factor domain, and SEQ ID NOs: 184, 185, and 186. In certain embodiments, the transcription factor protein further contains SEQ ID NO: 187. In certain embodiments, the at least one additional recombinant nucleic acid encodes a clr-2 transcription factor protein. In certain embodiments, the at least one recombinant nucleic acid is SEQ ID NO: 5 or SEQ ID NO: 165. In certain embodiments that may be combined with any of the preceding embodiments, the fungal host cell further contains at least one additional recombinant nucleic acid encoding an additional transcription factor, where the additional transcription factor protein contains a zinc(2)-cysteine(6) binuclear cluster domain, a PFAM04082 transcription factor domain, and at least one, at least two, at least three, at least four, or at least five polypeptide sequences selected from SEQ ID NOs: 188, 189, 190, 191, and 192. In certain embodiments, the at least one additional recombinant nucleic acid encodes a clr-1 transcription factor protein. In certain embodiments, the at least one additional recombinant nucleic acid encoding the additional transcription factor protein is SEQ ID NO: 2, SEQ ID NO: 119, or SEQ ID NO: 183.

[0025] In some embodiments, provided herein is a fungal host cell containing at least one recombinant nucleic acid encoding a clr-2 transcription factor protein.

[0026] Also provided herein is a fungal host cell containing at least one recombinant nucleic acid encoding a clr-2 transcription factor protein, where the recombinant nucleic acid is SEQ ID NO: 5 or SEQ ID NO: 165.

[0027] Also provided herein is a fungal host cell containing at least one recombinant nucleic acid encoding a clr-2 transcription factor protein, where the cell further contains at least one additional recombinant nucleic acid encoding a clr-1 transcription factor protein.

[0028] Also provided herein is a fungal host cell containing at least one recombinant nucleic acid encoding a clr-2 transcription factor protein and at least one additional recombinant nucleic acid encoding a clr-1 transcription factor protein, and where the recombinant nucleic acid encoding a clr-1 protein is SEQ ID NO: 2, SEQ ID NO: 119, or SEQ ID NO: 183.

[0029] Further provided herein is a fungal host cell containing at least one recombinant nucleic acid encoding a clr-2 transcription factor protein and at least one additional recombinant nucleic acid encoding a clr-1 transcription factor protein, where the recombinant nucleic acid encoding a clr-2 protein is SEQ ID NO: 5 or SEQ ID NO: 165, and the recombinant nucleic acid encoding a clr-1 protein is SEQ ID NO: 2, SEQ ID NO: 119, or SEQ ID NO: 183.

[0030] Also provided herein is a fungal host cell containing at least one recombinant nucleic acid encoding a clr-2 transcription factor protein, where the cell further contains one or more additional recombinant nucleic acids encoding a hemicellulase.

[0031] Also provided herein is a fungal host cell containing at least one recombinant nucleic acid encoding a clr-2 transcription factor protein and at least one additional recombinant nucleic acid encoding a clr-1 transcription factor protein, where the cell further contains one or more recombinant nucleic acids encoding a hemicellulase.

[0032] Also provided herein is a fungal host cell containing at least one recombinant nucleic acid encoding a clr-2 transcription factor protein, where the host cell is selected from Neurospora crassa, Metarhizium anisopliae, Gibberella zeae, Nectria haematococca, Magnaporthe oryzae, Neurospora tetrasperma, Sordaria macrospora, Chaetomium globosum, Podospora anserina, Verticillium albo-atrum, Glomerella graminicola, Grosmannia clavigera, Sclerotinia sclerotiorum, Botryotinia fuckeliana, Aspergillus oryzae, Aspergillus nidulans, Aspergillus niger, Aspergillus fumigatus, Penicillium chrysogenum, Leptosphaeria maculans, Phaeosphaeria nodorum, Pyrenophora tritici-repentis, Pyrenophora teres, Penicillium marneffei, Talaromyces stipitatus, Trichoderma reesei, Uncinocarpus reesii, Coccidioides immitus, Coccidioides posadasii, Saccharomyces cerevisiae, Schizosaccharomyces pombe, Sporotrichum thermophile (Myceliophthora thermophila), Thielavia terrestris-thermophilic, Acremonium cellulolyticus, Yarrowia lipolytica, Hansenula polymorpha, Kluyveromyces lactis, Pichia pastoris, Mycosphaerella graminicola, Neosartoryafischeri, Thermomyces lanuginosus (Humicola brevis, Humicola brevispora, Humicola grisea, Humicola lanuginosa, Monotospora lanuginosa, Sepedonium lanuginosum), Talaromyces thermophilus (Talaromyces dupontii, Penicillium dupontii), or Chrysosporium lucknowense.

[0033] Also provided herein is a fungal host cell containing at least one recombinant nucleic acid encoding a clr-2 transcription factor protein and at least one additional recombinant nucleic acid encoding a clr-1 transcription factor protein, where the host cell is selected from Neurospora crassa, Metarhizium anisopliae, Gibberella zeae, Nectria haematococca, Magnaporthe oryzae, Neurospora tetrasperma, Sordaria macrospora, Chaetomium globosum, Podospora anserina, Verticillium albo-atrum, Glomerella graminicola, Grosmannia clavigera, Sclerotinia sclerotiorum, Botryotinia fuckeliana, Aspergillus oryzae, Aspergillus nidulans, Aspergillus niger, Aspergillusfumigatus, Penicillium chrysogenum, Leptosphaeria maculans, Phaeosphaeria nodorum, Pyrenophora tritici-repentis, Pyrenophora teres, Penicillium marneffei, Talaromyces stipitatus, Trichoderma reesei, Uncinocarpus reesii, Coccidioides immitus, Coccidioides posadasii, Saccharomyces cerevisiae, Schizosaccharomyces pombe, Sporotrichum thermophile (Myceliophthora thermophila), Thielavia terrestris-thermophilic, Acremonium cellulolyticus, Yarrowia lipolytica, Hansenula polymorpha, Kluyveromyces lactis, Pichia pastoris, Mycosphaerella graminicola, Neosartorya fischeri, Thermomyces lanuginosus (Humicola brevis, Humicola brevispora, Humicola grisea, Humicola lanuginosa, Monotospora lanuginosa, Sepedonium lanuginosum), Talaromyces thermophilus (Talaromyces dupontii, Penicillium dupontii), or Chrysosporium lucknowense.

[0034] In some embodiments, provided herein is a method of increasing the growth of a fungal cell, the method including incubating a fungal host cell containing at least one recombinant nucleic acid encoding a clr-2 transcription factor protein in media under conditions sufficient to support the expression of said recombinant nucleic acid, where the host cell grows at a faster rate than a corresponding host cell lacking said recombinant nucleic acid.

[0035] In some embodiments, provided herein is a method of increasing the growth of a fungal cell, the method including incubating a fungal host cell containing at least one recombinant nucleic acid encoding a clr-2 transcription factor protein and at least one additional recombinant nucleic acid encoding a clr-1 transcription factor protein in media under conditions sufficient to support the expression of the recombinant nucleic acids, where the host cell grows at a faster rate than a corresponding host cell lacking said recombinant nucleic acids.

[0036] In some embodiments, provided herein is a method of increasing the production of cellulases from a fungal cell, the method including incubating a fungal host cell containing at least one recombinant nucleic acid encoding a clr-2 transcription factor protein in growth media under conditions sufficient to support the expression of said recombinant nucleic acid, where the host cell produces a greater amount of cellulases than a corresponding host cell lacking said recombinant nucleic acid.

[0037] In some embodiments, provided herein is method of increasing the production of cellulases from a fungal cell, the method including incubating a fungal host cell containing at least one recombinant nucleic acid encoding a clr-2 transcription factor protein and at least one additional recombinant nucleic acid encoding a clr-1 transcription factor protein in growth media under conditions sufficient to support the expression of the recombinant nucleic acids, where the host cell produces a greater amount of cellulases than a corresponding host cell lacking said recombinant nucleic acids.

[0038] Also provided herein is a method of increasing the production of cellulases from a fungal cell, the method including incubating a fungal host cell containing at least one recombinant nucleic acid encoding a clr-2 transcription factor protein in growth media that does not contain cellulose under conditions sufficient to support the expression of said recombinant nucleic acid, where the host cell produces a greater amount of cellulases than a corresponding host cell lacking said recombinant nucleic acid.

[0039] Also provided herein is a method of increasing the production of cellulases from a fungal cell, the method including incubating a fungal host cell containing at least one recombinant nucleic acid encoding a clr-2 transcription factor protein and at least one additional recombinant nucleic acid encoding a clr-1 transcription factor protein in growth media that does not contain cellulose under conditions sufficient to support the expression of said recombinant nucleic acids, where the host cell produces a greater amount of cellulases than a corresponding host cell lacking said recombinant nucleic acids.

[0040] In some embodiments, provided herein is a method of preparing one or more cellulases, the method including: a) incubating a fungal host cell containing at least one recombinant nucleic acid encoding a clr-2 transcription factor protein in media under conditions sufficient to support the expression of said recombinant nucleic acid, and b) collecting one or more cellulases from said media and/or said fungal host cell.

[0041] In some embodiments, provided herein is a method of preparing one or more cellulases, the method including: a) incubating a fungal host cell containing at least one recombinant nucleic acid encoding a clr-2 transcription factor protein and at least one additional recombinant nucleic acid encoding a clr-1 transcription factor protein in media under conditions sufficient to support the expression of said recombinant nucleic acids, and b) collecting one or more cellulases from said media and/or said fungal host cell.

[0042] Further provided herein is a method of degrading a cellulose-containing material, the method including: a) contacting the cellulose-containing material with a fungal host cell containing at least one recombinant nucleic acid encoding a clr-2 transcription factor protein, and b) incubating the fungal host cell and cellulose-containing material under conditions that support cellulose degradation.

[0043] Also provided herein is a method of degrading a cellulose-containing material, the method including: a) contacting the cellulose-containing material with a fungal host cell containing at least one recombinant nucleic acid encoding a clr-2 transcription factor protein and at least one additional recombinant nucleic acid encoding a clr-1 transcription factor protein, and b) incubating the fungal host cell and cellulose-containing material under conditions that support cellulose degradation.

[0044] Further provided herein is a method of converting a cellulose-containing material to fermentation product, the method including: a) contacting the cellulose-containing material with a fungal host cell containing at least one recombinant nucleic acid encoding a clr-2 transcription factor protein, to yield a sugar solution, and b) culturing the sugar solution with a fermentative microorganism under conditions sufficient to produce a fermentation product.

[0045] Also provided herein is a method of converting a cellulose-containing material to fermentation product, the method including: a) contacting the cellulose-containing material with a fungal host cell containing at least one recombinant nucleic acid encoding a clr-2 transcription factor protein and at least one additional recombinant nucleic acid encoding a clr-1 transcription factor protein, to yield a sugar solution, and b) culturing the sugar solution with a fermentative microorganism under conditions sufficient to produce a fermentation product.

[0046] Also provided herein is a method of converting biomass to fermentation product, the method including: a) contacting the biomass with a fungal host cell containing at least one recombinant nucleic acid encoding a clr-2 transcription factor protein, to yield a sugar solution, and b) culturing the sugar solution with a fermentative microorganism under conditions sufficient to produce a fermentation product.

[0047] Also provided herein is a method of converting biomass to fermentation product, the method including: a) contacting the biomass with a fungal host cell containing at least one recombinant nucleic acid encoding a clr-2 transcription factor protein and at least one additional recombinant nucleic acid encoding a clr-1 transcription factor protein, to yield a sugar solution, and b) culturing the sugar solution with a fermentative microorganism under conditions sufficient to produce a fermentation product.

[0048] Also provided herein is a method of converting biomass to fermentation product, the method including: a) pretreating the biomass, b) contacting the biomass with a fungal host cell containing at least one recombinant nucleic acid encoding a clr-2 transcription factor protein, to yield a sugar solution, and c) culturing the sugar solution with a fermentative microorganism under conditions sufficient to produce a fermentation product.

[0049] Also provided herein is a method of converting biomass to fermentation product, the method including: a) pretreating the biomass, b) contacting the biomass with a fungal host cell containing at least one recombinant nucleic acid encoding a clr-2 transcription factor protein and at least one additional recombinant nucleic acid encoding a clr-1 transcription factor protein, to yield a sugar solution, and c) culturing the sugar solution with a fermentative microorganism under conditions sufficient to produce a fermentation product.

[0050] Also provided herein is a method of converting biomass to fermentation product, the method including: a) pretreating the biomass by a method that includes one or more of ammonia fiber expansion (AFEX), steam explosion, treatment with high temperature, treatment with high pressure, treatment with alkaline aqueous solutions, treatment with acidic solutions, treatment with organic solvents, treatment with ionic liquids (IL), treatment with electrolyzed water, and treatment with phosphoric acid, b) contacting the biomass with a fungal host cell containing at least one recombinant nucleic acid encoding a clr-2 transcription factor protein, to yield a sugar solution, and c) culturing the sugar solution with a fermentative microorganism under conditions sufficient to produce a fermentation product.

[0051] Also provided herein is a method of converting biomass to fermentation product, the method including: a) pretreating the biomass by a method that includes one or more of ammonia fiber expansion (AFEX), steam explosion, treatment with high temperature, treatment with high pressure, treatment with alkaline aqueous solutions, treatment with acidic solutions, treatment with organic solvents, treatment with ionic liquids (IL), treatment with electrolyzed water, and treatment with phosphoric acid, b) contacting the biomass with a fungal host cell containing at least one recombinant nucleic acid encoding a clr-2 transcription factor protein and at least one additional recombinant nucleic acid encoding a clr-1 transcription factor protein, to yield a sugar solution, and c) culturing the sugar solution with a fermentative microorganism under conditions sufficient to produce a fermentation product.

[0052] Additionally provided herein is a method of converting a plant material to fermentation product, the method including: a) contacting the biomass with a fungal host cell containing at least one recombinant nucleic acid encoding a clr-2 transcription factor protein, to yield a sugar solution, and b) culturing the sugar solution with a fermentative microorganism under conditions sufficient to produce a fermentation product.

[0053] Additionally provided herein is a method of converting a plant material to fermentation product, the method including: a) contacting the biomass with a fungal host cell containing at least one recombinant nucleic acid encoding a clr-2 transcription factor protein and at least one additional recombinant nucleic acid encoding a clr-1 transcription factor protein, to yield a sugar solution, and b) culturing the sugar solution with a fermentative microorganism under conditions sufficient to produce a fermentation product.

[0054] Also provided herein is a method of converting a plant material selected from Miscanthus, switchgrass, cord grass, rye grass, reed canary grass, elephant grass, common reed, wheat straw, barley straw, canola straw, oat straw, corn stover, soybean stover, oat hulls, sorghum, rice hulls, sugarcane bagasse, corn fiber, Distillers Dried Grains with Solubles (DDGS), Blue Stem, corncobs, pine wood, birch wood, willow wood, aspen wood, poplar wood, and energy cane to fermentation product, the method including: a) contacting the biomass with a fungal host cell containing at least one recombinant nucleic acid encoding a clr-2 transcription factor protein, to yield a sugar solution, and b) culturing the sugar solution with a fermentative microorganism under conditions sufficient to produce a fermentation product.

[0055] Also provided herein is a method of converting a plant material selected from Miscanthus, switchgrass, cord grass, rye grass, reed canary grass, elephant grass, common reed, wheat straw, barley straw, canola straw, oat straw, corn stover, soybean stover, oat hulls, sorghum, rice hulls, sugarcane bagasse, corn fiber, Distillers Dried Grains with Solubles (DDGS), Blue Stem, corncobs, pine wood, birch wood, willow wood, aspen wood, poplar wood, and energy cane to fermentation product, the method including: a) contacting the biomass with a fungal host cell containing at least one recombinant nucleic acid encoding a clr-2 transcription factor protein and at least one additional recombinant nucleic acid encoding a clr-1 transcription factor protein, to yield a sugar solution, and b) culturing the sugar solution with a fermentative microorganism under conditions sufficient to produce a fermentation product.

[0056] Further provided herein is a method of reducing the viscosity of a pretreated biomass material, the method including contacting the pretreated biomass material with a fungal host cell containing at least one recombinant nucleic acid encoding a clr-2 transcription factor protein, to yield a pretreated biomass material having reduced viscosity.

[0057] Further provided herein is a method of reducing the viscosity of a pretreated biomass material, the method including contacting the pretreated biomass material with a fungal host cell containing at least one recombinant nucleic acid encoding a clr-2 transcription factor protein and at least one additional recombinant nucleic acid encoding a clr-1 transcription factor protein, to yield a pretreated biomass material having reduced viscosity.

[0058] In some embodiments, provided herein is a non-naturally occurring fungal cell, where the cell naturally contains genes encoding clr-1 and clr-2 proteins, and where the cell contains modifications causing reduced expression of the clr-1 and clr-2 proteins, as compared to the expression of the clr-1 and clr-2 proteins in a corresponding fungal cell lacking said modifications.

[0059] Also provided herein is a non-naturally occurring fungal cell, where the cell naturally contains genes encoding clr-1 and clr-2 proteins, and where the cell contains modifications causing reduced expression of the clr-1 and clr-2 proteins, as compared to the expression of the clr-1 and clr-2 proteins in a corresponding fungal cell lacking said modifications, and where the modifications are caused by RNAi, antisense RNA, T-DNA insertion, transposon insertion, insertional mutagenesis, site-directed mutagenesis, partial deletion of the gene, or complete deletion of the gene.

[0060] Also provided herein is a non-naturally occurring Neurospora cell, where the cell naturally contains genes encoding clr-1 and clr-2 proteins, and where the cell contains modifications causing reduced expression of the clr-1 and clr-2 proteins, as compared to the expression of the clr-1 and clr-2 proteins in a corresponding fungal cell lacking said modifications.

[0061] Also provided herein is a non-naturally occurring fungal cell, where the cell naturally contains genes encoding clr-1 and clr-2 proteins, and where the cell contains modifications causing reduced expression of the clr-1 and clr-2 proteins, as compared to the expression of the clr-1 and clr-2 proteins in a corresponding fungal cell lacking said modifications, and where the cell further contains a recombinant nucleic acid encoding a polypeptide involved in cellulose metabolism.

[0062] Also provided herein is a non-naturally occurring fungal cell, where the cell naturally contains genes encoding clr-1 and clr-2 proteins, and where the cell contains modifications causing reduced expression of the clr-1 and clr-2 proteins, as compared to the expression of the clr-1 and clr-2 proteins in a corresponding fungal cell lacking said modifications, and where the cell further contains a recombinant nucleic acid encoding a cellulase.

[0063] In some embodiments, provided herein is a non-Neurospora cell, containing DNA encoding one or more cellulase polypeptides and at least one gene orthologous to the Neurospora crassa gene SEQ ID NO: 5, where the cell contains at least one modification causing reduced expression of at least one of said gene(s) orthologous to the Neurospora crassa gene SEQ ID NO: 5, as compared with a corresponding cell lacking said modification, and, where the reduced expression of at least one of said gene(s) orthologous to the Neurospora crassa gene SEQ ID NO: 5 causes reduced expression of one or more of said cellulase polypeptides, as compared with expression of said cellulase polypeptides in a corresponding cell lacking said modification.

[0064] In some embodiments, provided herein is a non-Neurospora cell, containing DNA encoding one or more cellulase polypeptides, at least one gene orthologous to the Neurospora crassa gene SEQ ID NO: 5, and at least one gene orthologous to the Neurospora crassa gene SEQ ID NO: 2, where the cell contains at least one modification causing reduced expression of at least one of said gene(s) orthologous to the Neurospora crassa gene SEQ ID NO: 5 and at least one modification causing reduced expression of one of said gene(s) orthologous to the Neurospora crassa gene SEQ ID NO: 2, as compared with a corresponding cell lacking said modifications, and, where the reduced expression of at least one of said gene(s) orthologous to the Neurospora crassa gene SEQ ID NO: 5 and at least one of said gene(s) orthologous to the Neurospora crassa gene SEQ ID NO: 2 causes reduced expression of one or more of said cellulase polypeptides, as compared with expression of said cellulase polypeptides in a corresponding cell lacking said modifications.

[0065] Also provided herein is a non-Neurospora cell, containing DNA encoding one or more cellulase polypeptides and at least one gene orthologous to the Neurospora crassa gene SEQ ID NO: 5, where the cell contains at least one modification causing reduced expression of at least one of said gene(s) orthologous to the Neurospora crassa gene SEQ ID NO: 5, as compared with a corresponding cell lacking said modification, and, where the reduced expression of at least one of said gene(s) orthologous to the Neurospora crassa gene SEQ ID NO: 5 causes reduced expression of one or more of said cellulase polypeptides, as compared with expression of said cellulase polypeptides in a corresponding cell lacking said modification, and where the modification(s) are caused by RNAi, antisense RNA, T-DNA insertion, transposon insertion, insertional mutagenesis, site-directed mutagenesis, partial deletion of the gene, or complete deletion of the gene.

[0066] Also provided herein is a non-Neurospora cell, containing DNA encoding one or more cellulase polypeptides, at least one gene orthologous to the Neurospora crassa gene SEQ ID NO: 5, and at least one gene orthologous to the Neurospora crassa gene SEQ ID NO: 2, where the cell contains at least one modification causing reduced expression of at least one of said gene(s) orthologous to the Neurospora crassa gene SEQ ID NO: 5 and at least one modification causing reduced expression of one of said gene(s) orthologous to the Neurospora crassa gene SEQ ID NO: 2, as compared with a corresponding cell lacking said modifications, and, where the reduced expression of at least one of said gene(s) orthologous to the Neurospora crassa gene SEQ ID NO: 5 and at least one of said gene(s) orthologous to the Neurospora crassa gene SEQ ID NO: 2 causes reduced expression of one or more of said cellulase polypeptides, as compared with expression of said cellulase polypeptides in a corresponding cell lacking said modifications, and where the modification(s) are caused by RNAi, antisense RNA, T-DNA insertion, transposon insertion, insertional mutagenesis, site-directed mutagenesis, partial deletion of the gene, or complete deletion of the gene.

[0067] Also provided herein is a non-Neurospora cell, containing DNA encoding one or more cellulase polypeptides and at least one gene orthologous to the Neurospora crassa gene SEQ ID NO: 5, where the cell contains at least one modification causing reduced expression of at least one of said gene(s) orthologous to the Neurospora crassa gene SEQ ID NO: 5, as compared with a corresponding cell lacking said modification, and, where the reduced expression of at least one of said gene(s) orthologous to the Neurospora crassa gene SEQ ID NO: 5 causes reduced expression of one or more of said cellulase polypeptides, as compared with expression of said cellulase polypeptides in a corresponding cell lacking said modification, and where the cell contains one or more RNAi-inducing vectors, where the one or more vectors generate RNAi against one or more genes orthologous to the Neurospora crassa gene SEQ ID NO: 5.

[0068] Also provided herein is a non-Neurospora cell, containing DNA encoding one or more cellulase polypeptides, at least one gene orthologous to the Neurospora crassa gene SEQ ID NO: 5, and at least one gene orthologous to the Neurospora crassa gene SEQ ID NO: 2, where the cell contains at least one modification causing reduced expression of at least one of said gene(s) orthologous to the Neurospora crassa gene SEQ ID NO: 5 and at least one modification causing reduced expression of one of said gene(s) orthologous to the Neurospora crassa gene SEQ ID NO: 2, as compared with a corresponding cell lacking said modifications, and, where the reduced expression of at least one of said gene(s) orthologous to the Neurospora crassa gene SEQ ID NO: 5 and at least one of said gene(s) orthologous to the Neurospora crassa gene SEQ ID NO: 2 causes reduced expression of one or more of said cellulase polypeptides, as compared with expression of said cellulase polypeptides in a corresponding cell lacking said modifications, and where the cell contains one or more RNAi-inducing vectors, where the one or more vectors generate RNAi against one or more genes orthologous to the Neurospora crassa gene SEQ ID NO: 5 or SEQ ID NO: 2.

[0069] Also provided herein is a non-Neurospora cell, containing DNA encoding one or more cellulase polypeptides, at least one gene orthologous to the Neurospora crassa gene SEQ ID NO: 5, and a recombinant nucleic acid encoding a polypeptide involved in cellulose metabolism, where the cell contains at least one modification causing reduced expression of at least one of said gene(s) orthologous to the Neurospora crassa gene SEQ ID NO: 5, as compared with a corresponding cell lacking said modification, and, where the reduced expression of at least one of said gene(s) orthologous to the Neurospora crassa gene SEQ ID NO: 5 causes reduced expression of one or more of said cellulase polypeptides, as compared with expression of said cellulase polypeptides in a corresponding cell lacking said modification.

[0070] Also provided herein is a non-Neurospora cell, containing DNA encoding one or more cellulase polypeptides, at least one gene orthologous to the Neurospora crassa gene SEQ ID NO: 5, at least one gene orthologous to the Neurospora crassa gene SEQ ID NO: 2, and a recombinant nucleic acid encoding a polypeptide involved in cellulose metabolism, where the cell contains at least one modification causing reduced expression of at least one of said gene(s) orthologous to the Neurospora crassa gene SEQ ID NO: 5 and at least one modification causing reduced expression of one of said gene(s) orthologous to the Neurospora crassa gene SEQ ID NO: 2, as compared with a corresponding cell lacking said modifications, and, where the reduced expression of at least one of said gene(s) orthologous to the Neurospora crassa gene SEQ ID NO: 5 and at least one of said gene(s) orthologous to the Neurospora crassa gene SEQ ID NO: 2 causes reduced expression of one or more of said cellulase polypeptides, as compared with expression of said cellulase polypeptides in a corresponding cell lacking said modifications.

[0071] Additionally provided herein is a non-Neurospora cell, containing DNA encoding one or more cellulase polypeptides, at least one gene orthologous to the Neurospora crassa gene SEQ ID NO: 5, and a recombinant nucleic acid encoding a cellulase, where the cell contains at least one modification causing reduced expression of at least one of said gene(s) orthologous to the Neurospora crassa gene SEQ ID NO: 5, as compared with a corresponding cell lacking said modification, and, where the reduced expression of at least one of said gene(s) orthologous to the Neurospora crassa gene SEQ ID NO: 5 causes reduced expression of one or more of said cellulase polypeptides, as compared with expression of said cellulase polypeptides in a corresponding cell lacking said modification.

[0072] Additionally provided herein is a non-Neurospora cell, containing DNA encoding one or more cellulase polypeptides, at least one gene orthologous to the Neurospora crassa gene SEQ ID NO: 5, at least one gene orthologous to the Neurospora crassa gene SEQ ID NO: 2, and a recombinant nucleic acid encoding a cellulase, where the cell contains at least one modification causing reduced expression of at least one of said gene(s) orthologous to the Neurospora crassa gene SEQ ID NO: 5 and at least one modification causing reduced expression of one of said gene(s) orthologous to the Neurospora crassa gene SEQ ID NO: 2, as compared with a corresponding cell lacking said modifications, and, where the reduced expression of at least one of said gene(s) orthologous to the Neurospora crassa gene SEQ ID NO: 5 and at least one of said gene(s) orthologous to the Neurospora crassa gene SEQ ID NO: 2 causes reduced expression of one or more of said cellulase polypeptides, as compared with expression of said cellulase polypeptides in a corresponding cell lacking said modifications.

[0073] Further provided herein is a non-Neurospora cell, containing DNA encoding one or more cellulase polypeptides and at least one gene orthologous to the Neurospora crassa gene SEQ ID NO: 5, where the cell contains at least one modification causing reduced expression of at least one of said gene(s) orthologous to the Neurospora crassa gene SEQ ID NO: 5, as compared with a corresponding cell lacking said modification, where the reduced expression of at least one of said gene(s) orthologous to the Neurospora crassa gene SEQ ID NO: 5 causes reduced expression of one or more of said cellulase polypeptides, as compared with expression of said cellulase polypeptides in a corresponding cell lacking said modification, and where the host cell is selected from Metarhizium anisopliae, Gibberella zeae, Nectria haematococca, Magnaporthe oryzae, Neurospora tetrasperma, Sordaria macrospora, Chaetomium globosum, Podospora anserina, Verticillium albo-atrum, Glomerella graminicola, Grosmannia clavigera, Sclerotinia sclerotiorum, Botryotinia fuckeliana, Aspergillus oryzae, Aspergillus nidulans, Aspergillus niger, Aspergillusfumigatus, Penicillium chrysogenum, Leptosphaeria maculans, Phaeosphaeria nodorum, Pyrenophora tritici-repentis, Pyrenophora teres, Penicillium marneffei, Talaromyces stipitatus, Trichoderma reesei, Uncinocarpus reesii, Coccidioides immitus, Coccidioides posadasii, Saccharomyces cerevisiae, Schizosaccharomyces pombe, Sporotrichum thermophile (Myceliophthora thermophila), Thielavia terrestris-thermophilic, Acremonium cellulolyticus, Yarrowia lipolytica, Hansenula polymorpha, Kluyveromyces lactis, Pichia pastoris, Mycosphaerella graminicola, Neosartorya fischeri, Thermomyces lanuginosus (Humicola brevis, Humicola brevispora, Humicola grisea, Humicola lanuginosa, Monotospora lanuginosa, Sepedonium lanuginosum), Talaromyces thermophilus (Talaromyces dupontii, Penicillium dupontii), or Chrysosporium lucknowense.

[0074] Further provided herein is a non-Neurospora cell, containing DNA encoding one or more cellulase polypeptides, at least one gene orthologous to the Neurospora crassa gene SEQ ID NO: 5, and at least one gene orthologous to the Neurospora crassa gene SEQ ID NO: 2, where the cell contains at least one modification causing reduced expression of at least one of said gene(s) orthologous to the Neurospora crassa gene SEQ ID NO: 5 and at least one modification causing reduced expression of one of said gene(s) orthologous to the Neurospora crassa gene SEQ ID NO: 2, as compared with a corresponding cell lacking said modifications, where the reduced expression of at least one of said gene(s) orthologous to the Neurospora crassa gene SEQ ID NO: 5 and at least one of said gene(s) orthologous to the Neurospora crassa gene SEQ ID NO: 2 causes reduced expression of one or more of said cellulase polypeptides, as compared with expression of said cellulase polypeptides in a corresponding cell lacking said modifications, and where the host cell is selected from Metarhizium anisopliae, Gibberella zeae, Nectria haematococca, Magnaporthe oryzae, Neurospora tetrasperma, Sordaria macrospora, Chaetomium globosum, Podospora anserina, Verticillium albo-atrum, Glomerella graminicola, Grosmannia clavigera, Sclerotinia sclerotiorum, Botryotinia fuckeliana, Aspergillus oryzae, Aspergillus nidulans, Aspergillus niger, Aspergillus fumigatus, Penicillium chrysogenum, Leptosphaeria maculans, Phaeosphaeria nodorum, Pyrenophora tritici-repentis, Pyrenophora teres, Penicillium marneffei, Talaromyces stipitatus, Trichoderma reesei, Uncinocarpus reesii, Coccidioides immitus, Coccidioides posadasii, Saccharomyces cerevisiae, Schizosaccharomyces pombe, Sporotrichum thermophile (Myceliophthora thermophila), Thielavia terrestris-thermophilic, Acremonium cellulolyticus, Yarrowia lipolytica, Hansenula polymorpha, Kluyveromyces lactis, Pichia pastoris, Mycosphaerella graminicola, Neosartorya fischeri, Thermomyces lanuginosus (Humicola brevis, Humicola brevispora, Humicola grisea, Humicola lanuginosa, Monotospora lanuginosa, Sepedonium lanuginosum), Talaromyces thermophilus (Talaromyces dupontii, Penicillium dupontii), or Chrysosporium lucknowense.

[0075] In another embodiment, provided herein is a fungal host cell containing a recombinant nucleic acid encoding a clr-2 transcription factor protein, where the cell further contains one or more recombinant nucleic acids that encode a polypeptide involved in a biochemical pathway for the production of a biofuel.

[0076] In another embodiment, provided herein is a fungal host cell containing a recombinant nucleic acid encoding a clr-2 transcription factor protein and a recombinant nucleic acid encoding a clr-1 transcription factor protein, where the cell further contains one or more recombinant nucleic acids that encode a polypeptide involved in a biochemical pathway for the production of a biofuel.

[0077] In another embodiment, provided herein is a non-naturally occurring fungal cell, where the cell naturally contains genes encoding clr-1 and clr-2 proteins, and where the cell contains modifications causing reduced expression of one or both of the clr-1 and clr-2 proteins, as compared to the expression of the clr-1 and clr-2 proteins in a corresponding fungal cell lacking said modifications, where the cell further contains one or more recombinant nucleic acids that encode a polypeptide involved in a biochemical pathway for the production of a biofuel.

[0078] Also provided herein is a fungal host cell containing a recombinant nucleic acid encoding a clr-2 transcription factor protein, where the cell further contains one or more recombinant nucleic acids that encode a polypeptide involved in a biochemical pathway for the production of a biofuel, and where the biofuel is selected from ethanol, n-propanol, n-butanol, iso-butanol, 3-methyl-1-butanol, 2-methyl-1-butanol, 3-methyl-1-pentanol, and octanol.

[0079] Also provided herein is a fungal host cell containing a recombinant nucleic acid encoding a clr-2 transcription factor protein and a recombinant nucleic acid encoding a clr-1 transcription factor protein, where the cell further contains one or more recombinant nucleic acids that encode a polypeptide involved in a biochemical pathway for the production of a biofuel, and where the biofuel is selected from ethanol, n-propanol, n-butanol, iso-butanol, 3-methyl-1-butanol, 2-methyl-1-butanol, 3-methyl-1-pentanol, and octanol.

[0080] Also provided herein is a non-naturally occurring fungal cell, where the cell naturally contains genes encoding clr-1 and clr-2 proteins, and where the cell contains modifications causing reduced expression of one or both of the clr-1 and clr-2 proteins, as compared to the expression of the clr-1 and clr-2 proteins in a corresponding fungal cell lacking said modifications, where the cell further contains one or more recombinant nucleic acids that encode a polypeptide involved in a biochemical pathway for the production of a biofuel, and where the biofuel is selected from ethanol, n-propanol, n-butanol, iso-butanol, 3-methyl-1-butanol, 2-methyl-1-butanol, 3-methyl-1-pentanol, and octanol.

[0081] Further provided herein is a method of converting a cellulose-containing material to fermentation product, the method including contacting the cellulose-containing material with a fungal host cell containing a recombinant nucleic acid encoding a clr-2 transcription factor protein, and where the cell further contains one or more recombinant nucleic acids that encode a polypeptide involved in a biochemical pathway for the production of a biofuel.

[0082] Further provided herein is a method of converting a cellulose-containing material to fermentation product, the method including contacting the cellulose-containing material with a fungal host cell containing a recombinant nucleic acid encoding a clr-2 transcription factor protein and a recombinant nucleic acid encoding a clr-1 transcription factor protein, and where the cell further contains one or more recombinant nucleic acids that encode a polypeptide involved in a biochemical pathway for the production of a biofuel.

[0083] Further provided herein is a method of converting a cellulose-containing material to fermentation product, the method including contacting the cellulose-containing material with a non-naturally occurring fungal cell, where the cell naturally contains genes encoding clr-1 and clr-2 proteins, and where the cell contains modifications causing reduced expression of one or both of the clr-1 and clr-2 proteins, as compared to the expression of the clr-1 and clr-2 proteins in a corresponding fungal cell lacking said modifications, and where the cell further contains one or more recombinant nucleic acids that encode a polypeptide involved in a biochemical pathway for the production of a biofuel.

### BRIEF DESCRIPTION OF THE DRAWINGS

[0084] The patent or application file contains at least one drawing executed in color. Copies of this patent or patent application publication with color drawings will be provided by the office upon request and payment of the necessary fee.

[0085] FIG. 1 depicts expression patterns for secreted enzymes after media shift. FIG. 1A depicts typical expression patterns for secreted enzymes after shift to no carbon or a new carbon source. FIG. 1B depicts message abundance for 16 predicted Neurospora crassa cellulases after cultures are shifted to no carbon or a new carbon source. FIG. 1C depicts message abundance for 12 predicted N. crassa hemicelluses after cultures are shifted to a no carbon or a new carbon source. Abundances are given as fragments per kilobase of exon length per million reads fragments (FPKM) as calculated by Cufflinks.

[0086] FIG. 2A depicts transcript abundance for the full Neurospora crassa (N. crassa) genome as compared between cellulose and sucrose cultures at 1 hour after transfer. FIG. 2B depicts transcript abundance for the full Neurospora crassa (N. crassa) genome as compared between sucrose and no-carbon at 1 hour. FIG. 2C depicts transcript abundance for the full Neurospora crassa (N. crassa) genome as compared between cellulose and no-carbon at 1 hour. FIG. 2D depicts transcript abundance for the full Neurospora crassa (N. crassa) genome as compared between cellulose and sucrose at 4 hours. FIG. 2E depicts transcript abundance for the full Neurospora crassa (N. crassa) genome as compared between sucrose and no-carbon at 4 hours. FIG. 2F depicts transcript abundance for the full Neurospora crassa (N. crassa) genome as compared between cellulose and no-carbon at 4 hours. Log₂ fold change is plotted against maximum abundance. For plotting purposes genes are given a minimum count of 1 FPKM in all conditions. Light-gray points are not statistically different by the model employed by Cuffdiff. Medium-gray points are statistically different, but not consistently different by a factor of 2 or more. Dark-gray/black points are statistically different and consistently different by 2-fold.

[0087] FIG. 3 depicts a comparison of differentially expressed genes from RNAseq and microarray data. Both Cellulose (CMM) vs. no-carbon (NC) and Cellulose vs. sucrose (SMM) conditions are compared. FIG. 3A depicts gene sets of differentially expressed genes from CMM vs. NC(RNAseq data, purple circle), and differentially expressed genes from CMM vs. SMM (RNAseq data, blue circle). A third gene set (Microarray data, red circle), includes differentially expressed genes from cultures grown on CMM for 30 hours vs SMM for 16 hrs, Tian et al., Proc Nat Acad Sci USA, 106: 22157-22162 (2009). Each of the 3 sets of differentially expressed genes includes both the up-regulated and down-regulated genes. FIG. 3B depicts a comparison of the RNAseq derived differentially expressed gene lists from FIG. 3A and separates them into up-regulated and down-regulated gene sets (The microarray data was not included in this analysis). White arrows pointing upward indicate genes that are up-regulated and downward pointing arrows indicate down-regulated genes.

[0088] FIG. 4 depicts growth and enzyme secretion of deletion strains for cdr-1 (clr-1) and cdr-2 (clr-2). FIG. 4A depicts growth of wild type and deletion strains in 5 ml tubes with SMM, XMM or CMM. FIG. 4B depicts growth on a layer of saturated cellulose minimal medium. FIG. 4C depicts an SDS-PAGE gel of culture supernatants from SMM cultures (16 hr) transferred to CMM or XMM and incubated for 24 hrs. In the SDS-PAGE gel, lane 1 shows the protein ladder; lane 2 shows the results of the wild-type strain grown on sucrose; lane 3 shows the results of the Δclr-1 deletion strain grown on sucrose; lane 4 shows the results of the Δclr-2 deletion strain grown on sucrose; lane 5 shows the results of the wild-type strain grown on xylan; lane 6 shows the results of the Δclr-1 deletion strain grown on xylan; lane 7 shows the results of the Δclr-2 deletion strain grown on xylan; lane 8 shows the results of the wild-type strain grown on Avicel®; lane 9 shows the results of the Δclr-1 deletion strain grown on Avicel®; and lane 10 shows the results of the Δclr-2 deletion strain grown on Avicel®. FIG. 4D depicts total cellulase activity as measured by glucose release from cellulose (Tian et al., Proc Nat Acad Sci USA, 106: 22157-22162 (2009)) in supernatants from 16 hr SMM cultures transferred to either CMM or XMM for 24 hrs. FIG. 4E depicts total xylanase activity as measured by reducing sugars released from xylan from CMM or XMM cultures from FIG. 4D. FIG. 4F depicts total protein as measured by the Bradford assay in CMM or XMM cultures from FIG. 4D.

[0089] FIG. 5A depicts the domain architecture of cdr-1 (clr-1) and cdr-2 (clr-2) showing PFAM domains that are conserved among Zn(2) Cys(6) binuclear cluster transcription factors. FIG. 5B depicts the construct design for natively tagged cdr-1-GFP tagging and a mis-expression cdr-1 construct (under regulation of the ccg-1 promoter). FIG. 5C depicts expression profiles of cdr-1 and cdr-2 following shift of a SMM-grown culture to CMM. FIG. 5D depicts FPKMs derived from cdr-1 and cdr-2 in a wild type N. crassa versus a cdr-1 or cdr-2 mutant. Note that expression of cdr-2 is dependent upon the presence of functional cdr-1, while expression of cdr-1 is similar to wild type in a cdr-2 mutant. FIG. 5E depicts the nuclear localization of natively GFP tagged CDR-1 (CLR-1). FIG. 5F depicts the relative expression of cbh-1 (NCU07340) and cdr-2 in the ccg1::cdr-1 strain on CMM versus SMM indicates that mis-expression of cdr-1 has no effect on expression levels of either cbh-1 or cdr-2.

[0090] FIG. 6 depicts maximum likelihood phylogenetic trees of cdr-1 (clr-1) and cdr-2 (clr-2). FIG. 6A depicts cdr-1. FIG. 6B depicts cdr-2.

[0091] FIG. 7 depicts altered expression profiles in cdr (clr) deletion mutants. FIG. 7A depicts transcript abundance of predicted cellulase genes in wild type and cdr mutant strains at 4 hrs after transfer to CMM. FIG. 7B depicts expression profiles of predicted hemicellulase genes in wild type and cdr mutant strains at 4 hrs after transfer to CMM. FIG. 7C depicts global expression in Δcdr-1 (Δclr-1) as compared to wild type after transfer to CMM for 4 hrs. FIG. 7D depicts global expression in Δcdr-2 (Δclr-2) as compared to wild type after transfer to CMM for 4 hrs. FIG. 7E depicts hierarchical clustering of FPKM at 4 hrs after transfer to CMM for genes identified as differentially expressed in clr mutants and/or in the wild type cellulose to no-carbon comparison. FIG. 7F depicts major classes of genes in the clusters from FIG. 7E. FIG. 7G depicts FPKM of selected cellulases and hemicellulases. Predicted hemicellulases exhibiting cellulase-like expression patterns are regulated by cdr-1 and cdr-2.

[0092] FIG. 8 depicts a non-limiting model for cellulase regulation by cdr-1 (clr-1) and cdr-2 (clr-2). (1) Glucose repression is released. (2) Scout cellulases and hemicellulases degrade plant cell wall material, releasing signal molecules. (3, 4) Signal cascade activates CDR-1 (CLR-1), driving further expression of cdr-1 followed by cdr-2. (5) CDR-2 (CLR-2) and possibly CDR-1 drives expression of the cellulases and some hemicellulases. (6) Cellulases and hemicellulases release more signal molecules, perpetuating the cycle.

[0093] FIG. 9 depicts phylogenetic trees based on Bayesian inference. FIG. 9A depicts a cdr-1 (clr-1) tree. FIG. 9B depicts a cdr-2 (clr-2) tree.

[0094] FIG. 10 depicts transcript abundance of cbh-1 and cdt-2 in triple beta-glucosidase deletion mutants (ΔBG) with or without deletion of clr-1 or clr-2 four hours after shift to 0.2% cellobiose.

[0095] FIG. 11A depicts cellulase activity in culture supernatants as measured by cellobiose release from Avicel®. Cultures were grown 24 hours on sucrose then transferred to fresh media. FIG. 11B depicts transcription of cbh-1 as a function of clr-1 abundance. All measurements are by RT-PCR 4 hours after media shift from sucrose cultures.

[0096] FIG. 12A depicts transcript abundance of cbh-1 relative to clr-2 in N. crassa strains 4 hours after shift from sucrose media. FIG. 12B depicts CMCase activity in WT and clr-2 mis-expression strain supernatants after growth in sucrose or Avicel®. FIG. 12C depicts CMCase activity of clr-2 mis-expression strains after a sucrose grown culture was shifted to fresh media with 2% sucrose or 2% Avicel®. FIG. 12D depicts secreted protein in culture supernatants from clr-2 mis-expression strains after a sucrose grown culture was shifted to fresh media with 2% sucrose or 2% Avicel®.

[0097] FIG. 13A depicts an SDS-PAGE gel of culture supernatants from WT and clr-2 mis-expression strains. FIG. 13B depicts transcript abundance (RNAseq) of selected cellulase genes in WT N. crassa, deletion strains for clr-1 and clr-2 after transfer to Avicel®; and WT and clr-2 mis-expression strains after transfer to no carbon.

[0098] FIG. 14 depicts hierarchical clustering of the N. crassa Avicel® regulon by FPKM in alternative inducing conditions and clr mutants.

[0099] FIG. 15 depicts a Western blot (anti-V5 antibody) of tagged and untagged clr-1 (NCU07705) in N. crassa lysates 4 hours after media shift to various carbon sources. Suc refers to sucrose, Avi refers to Avicel®, NC refers to no carbon, Cel refers to cellobiose, Xa refers to xylan, and Xo refers to xylose. The predicted size of the V5 tagged CLR-1 is ˜80 kDa. Equal total protein concentrations were loaded per lane.

[0100] FIG. 16A depicts a Venn Diagram comparing the clr-1/2 ChiPseq regulons to the cellulose response RNAseq regulon. FIG. 16B depicts a graphical representation of the CLR-1 ChIP-Seq. The grey peaks represent the relative number of reads mapping to several sites within the promoter regions of clr-1 (NCU07705) and clr-2 (NCU08042). FIG. 16C depicts CLR-1 and CLR-2 ChIP-Seq as well as a 4 hour Avicel® RNA-Seq mapped to the genome. The figure shows the typical ChIP binding pattern of CLR-1 and CLR-2 when they regulate the same gene. CLR-1 and CLR-2 bind to the promoter of xlr-1 in nearly identical places.

[0101] FIG. 17 depicts the phenotype of A. nidulans clr deletion strains ΔclrA and ΔclrB. FIG. 17A depicts the enzyme activity of culture supernatants from ΔclrA and ΔclrB mutants grown on glucose and then shifted to Avicel® media. FIG. 17B depicts the total protein in supernatants of cultures grown on Avicel®. FIG. 17C depicts mycelial dry weights from WT and clr mutants from cultures on glucose and cellobiose (0.5% wt/vol). FIG. 17D depicts induction of selected cellulase genes in WT and the cdr mutants following an 8 hr shift to Avicel®, by quantitative RT-PCR. Statistical significance by one tailed, unequal variance t-test. *P<0.05, **P<0.01, ***P<0.001. FIG. 17E depicts the expression of clrA and clrB in Aspergillus nidulans ΔclrA and ΔclrB mutants after the cultures were exposed to Avicel®. The culture were pre-grown in glucose media for 17 hrs at 37° C. and then shifted to Avicel® media.

[0102] FIG. 18A depicts the expression of the clrB gene in the clrB mis-expression strain. 0 hrs on glucose refers to the time just before shifting the culture grown 17 hr on glucose to media with other carbon source. FIG. 18B depicts the expression of the cbhD gene in the clrB mis-expression strain. 0 hrs on glucose refers to the time just before shifting the culture grown 17 hr on glucose to media with other carbon source. FIG. 18C depicts the growth and CMCase activity of clrB mis-expression strain grown on cellobiose for 48 hrs.

[0103] FIG. 19 depicts growth of an N. crassa clrA mis-expression strain and an N. crassa clrB mis-expression strain on cellobiose and Avicel®. FIG. 19A depicts biomass accumulation of the clrA mis-expression strain on cellobiose. FIG. 19B depicts growth of the clrA mis-expression strain on Avicel®. FIG. 19C depicts biomass accumulation of the clrB mis-expression strain on cellobiose. FIG. 19D depicts growth of the clrB mis-expression strain on Avicel®.

[0104] FIG. 20A depicts the Clr-1 DNA-binding motif as predicted from chromatin immunoprecipitation (ChIP) peaks. FIG. 20B depicts the Clr-2 DNA-binding motif as predicted from chromatin immunoprecipitation (ChIP) peaks.

[0105] FIG. 21 depicts an amino acid sequence alignment of N. crassa clr-1 with 22 clr-1 homologs showing conserved motifs. The conserved PFAM04082 transcription factor domain is boxed in dashes. The sequence alignment included the following sequences: Gibberella_zeae_PH-1 (SEQ ID NO: 193), Nectria_haematococca_mpVI_{—}77-13-4 (SEQ ID NO: 194), NCU07705 (SEQ ID NO: 2), Neurospora_tetrasperma_FGSC_{—}2508 (SEQ ID NO: 195), Sordaria_macrospora_k-hell (SEQ ID NO: 196), Chaetomium_globosum_CBS_{—}148.51 (SEQ ID NO: 197), Podospora_anserina_S_mat+ (SEQ ID NO: 198), Verticillium_albo-atrum_VaMs.102 (SEQ ID NO: 199), Glomerella_graminicola_M1.001 (SEQ ID NO: 200), Metarhizium_anisopliae_ARSEF_{—}23 (SEQ ID NO: 201), Botryotinia_fuckeliana_B05.10 (SEQ ID NO: 202), Sclerotinia_sclerotiorum_{—}1980 (SEQ ID NO: 203), Grosmannia_clavigera_kw1407 (SEQ ID NO: 204), AN5808 (SEQ ID NO: 205), Aspergillus_fumigatus_Af293 (SEQ ID NO: 206), Aspergillus_oryzae_RIB40 (SEQ ID NO: 207), Penicillium_chrysogenum_Wisconsin_{—}54-1255 (SEQ ID NO: 208), Aspergillus_niger (SEQ ID NO: 209), Pyrenophora_teres_f._teres_{—}0-1 (SEQ ID NO: 210), Leptosphaeria_maculans_JN3 (SEQ ID NO: 211), Talaromyces_stipitatus_ATCC_{—}10500 (SEQ ID NO: 212), NCU00808 (SEQ ID NO: 213), and Trichoderma_reesei_clr-1_protein (SEQ ID NO: 182).

[0106] FIG. 22 depicts an amino acid sequence alignment of N. crassa clr-1 with 21 clr-2 homologs showing conserved motifs. The conserved PFAM04082 transcription factor domain is boxed in dashes. The sequence alignment included the following sequences: AN6832 (SEQ ID NO: 214), Penicillium_marneffei_ATCC_{—}18224 (SEQ ID NO: 215), Talaromyces_stipitatus_ATCC_{—}10500 (SEQ ID NO: 216), AN3369 (SEQ ID NO: 217), Aspergillus_niger CBS_{—}513.88 (SEQ ID NO: 218), Aspergillus_oryzae_RIB40 (SEQ ID NO: 219), Penicillium_chrysogenum_Wisconsin_{—}54-1255 (SEQ ID NO: 220), Coccidioides_immitis_RS (SEQ ID NO: 221), Coccidioides_posadasii_C735_delta_SOWgp (SEQ ID NO: 222), NCU08042 (SEQ ID NO: 4), Neurospora_tetrasperma_FGSC_{—}2508 (SEQ ID NO: 223), Sordaria_macrospora_k-hell (SEQ ID NO: 224), Podospora_anserina_S_mat+(SEQ ID NO: 225), Glomerella_graminicola_M1.001 (SEQ ID NO: 226), Magnaporthe_oryzae_{—}70-15 (SEQ ID NO: 227), Nectria_haematococca_mpVI_{—}77-13-4 (SEQ ID NO: 228), Trichoderma_reesei (SEQ ID NO: 229), Verticillium_albo-atrum_VaMs.102 (SEQ ID NO: 230), Pyrenophora_tritici-repentis_Pt-1C-BFP (SEQ ID NO: 231), Pyrenophora_teres_f._teres_{—}0-1 (SEQ ID NO: 232), Leptosphaeria_maculans_JN3 (SEQ ID NO: 233), and NCU07007 (SEQ ID NO: 234).

### DETAILED DESCRIPTION

[0107] Provided herein are polypeptides involved in the response of cells to cellulose. Further provided herein are nucleic acids encoding polypeptides involved in the response of cells to cellulose. Also provide herein are host cells containing recombinant nucleic acids encoding polypeptides involved in the response of cells to cellulose, and host cells containing recombinant polypeptides involved in the response of cells to cellulose. In some aspects, provided herein are the polypeptides clr-1 and clr-2, and nucleic acids encoding clr-1 and clr-2 polypeptides.

[0108] Further provided herein are methods for use of clr-1 and clr-2 polypeptides, methods for use of nucleic acids encoding clr-1 and clr-2 polypeptides, and methods for use of host cells containing recombinant clr-1 and/or clr-2 polypeptides or nucleic acids encoding clr-1 and/or clr-2 polypeptides. In some aspects, clr-1 and clr-2 promote the expression of cellulases and other genes in response to cellulose. Accordingly, in some aspects, the expression of recombinant clr-1 and/or clr-2 in a host cell increases the growth rate of a host cell on media containing cellulose, increases the production of cellulases from the host cell, and/or increases the rate of cellulose degradation by the host cell.

[0109] In addition, provided herein are cells that naturally produce clr-1 and/or clr-2 polypeptides, which are modified to have reduced expression of clr-1 and/or clr-2. Cells which naturally produce clr-1 and/or clr-2 polypeptides, but which are modified to have reduced expression of clr-1 and/or clr-2 may be used, for example to study cellulases and the response of cells to cellulose.

[0110] As used herein the terms “cdr-1” and “clr-1” are used interchangeably and refer to polypeptides or genes encoding polypeptides that function as transcription factors that regulate the transcription of various genes in a fungal cell in response to the exposure of the cell to cellulose. One non-limiting example of a clr-1 encoding gene is the N. crassa gene NCU07705.

[0111] As used herein the terms “cdr-2” and “clr-2” are used interchangeably and refer to polypeptides or genes encoding polypeptides that function as transcription factors that regulate the transcription of various genes in a fungal cell in response to the exposure of the cell to cellulose. One non-limiting example of a clr-2 encoding gene is the N. crassa gene NCU08042.

[0112] Accordingly, in certain aspects the present disclosure relates to a method of degrading cellulose-containing material, by: a) contacting cellulose-containing material with a fungal host cell containing at least one recombinant nucleic acid encoding a transcription factor protein, where the transcription factor protein contains a zinc(2)-cysteine(6) binuclear cluster domain, a PFAM04082 transcription factor domain, and at least one, at least two, at least three, or at least four polypeptide sequences selected from SEQ ID NOs: 184, 185, 186, and 187; and b) incubating the fungal host cell and cellulose-containing material under conditions sufficient for the fungal host cell to degrade the cellulose-containing material.

[0113] Other aspects the present disclosure relates to a method of increasing the production of one or more cellulases from a fungal cell, by: (a) providing a fungal host cell containing at least one recombinant nucleic acid encoding a transcription factor protein, where the transcription factor protein contains a zinc(2)-cysteine(6) binuclear cluster domain, a PFAM04082 transcription factor domain, and at least one, at least two, at least three, or at least four polypeptide sequences selected from SEQ ID NOs: 184, 185, 186, and 187; and (b) culturing the host cell under conditions sufficient to support the expression of the at least one recombinant nucleic acid, where the fungal host cell produces a greater amount of the one or more cellulases than a corresponding host cell lacking the at least one recombinant nucleic acid.

[0114] Other aspects the present disclosure relates to a method of reducing the viscosity of a pretreated biomass material, by contacting pretreated biomass material with a fungal host cell containing at least one recombinant nucleic acid encoding a transcription factor protein, to yield a pretreated biomass material having reduced viscosity, where the transcription factor protein contains a zinc(2)-cysteine(6) binuclear cluster domain, a PFAM04082 transcription factor domain, and at least one, at least two, at least three, or at least four polypeptide sequences selected from SEQ ID NOs: 184, 185, 186, and 187.

### Polypeptides of the Disclosure

[0115] The present disclosure relates to polypeptides that are involved in the transcription of genes related to cellulose metabolism. In some aspects, the disclosure relates to clr-1 polypeptides. In some aspects, the disclosure relates to clr-2 polypeptides.

[0116] As used herein, a “polypeptide” is an amino acid sequence including a plurality of consecutive polymerized amino acid residues (e.g., at least about 15 consecutive polymerized amino acid residues). As used herein, “polypeptide” refers to an amino acid sequence, oligopeptide, peptide, protein, or portions thereof, and the terms “polypeptide” and “protein” are used interchangeably.

[0117] Clr-1

[0118] In some aspects, the present disclosure relates to clr-1 polypeptides. Clr-1 polypeptides function as transcription factors that regulate the transcription of various genes in a fungal cell in response to the exposure of the cell to cellulose. In some aspects, the expression of a gene is increased in response to clr-1 expression. In some aspects, the expression of a gene is decreased in response to clr-1 expression.

[0119] Clr-1 is a member of the fungal specific zinc binuclear cluster superfamily, which is large, diverse superfamily of fungal-specific transcriptional regulators. Examples of transcription factors in this superfamily include gal-4, ace-1, and xlnR (xyr-1) (Stricker et al., App. Micro. Biotech., 78: 211-220 (2008)). Clr-2 is also a member of this superfamily.

[0120] Members of this polypeptide superfamily typically contain two conserved domains: A) a zinc(2)-cysteine(6) binuclear cluster PFAM00172 domain, which coordinates binding of the polypeptide to the DNA, and B) a central domain, which roughly corresponds to what is known as the “middle homology region” (Campbell R N, Biochemical J., 414: 177-187, (2008)), a conserved domain in zinc finger transcription factors. In clr-1, the conserved central domain has the fungal-specific transcription factor domain PFAM04082.

[0121] As used herein, a “zinc(2)-cysteine(6) binuclear cluster domain” refers to the conserved DNA-binding domain of the fungal specific zinc binuclear cluster superfamily, typified by Saccharomyces cerevisiae Gal4, that contains a binuclear zinc cluster in which two zinc ions are bound by six cysteine residues (PFAM00172). Clr-1 polypeptides of the present disclosure, and homologs thereof, contain a “zinc(2)-cysteine(6) binuclear cluster domain” that includes the following conserved sequence: C-E-V-C-R-S-R-K-S-R-C-D-G-T-K-P-K-C-K-L-C-T-E-L-G-A-E-C-I-Y-R-E (SEQ ID NO: 235) (FIG. 21). Clr-2 polypeptides of the present disclosure, and homologs thereof, contain a “zinc(2)-cysteine(6) binuclear cluster domain” that includes the following conserved sequence: C-A-E-C-R-R-R-K-I-R-C-D-G-E-Q-PC-G-Q-C-X-W-Y-X-K-P-K-R-C-F-Y-R-V-X-P-S-R-K (SEQ ID NO: 236), where X can be any amino acid residue (FIG. 22).

[0122] As used herein, a “PFAM04082 transcription factor domain” refers to a fungal-specific transcription factor domain that is associated with a zinc finger or zinc binuclear transcription factor domain. Clr-1 polypeptides of the present disclosure, and homologs thereof, contain a “PFAM04082 transcription factor domain” that includes the following conserved sequence: I-E-A-Y-F-E-R-V-N-V-W-Y-A-C-V-N-P-Y-T-W-R-S-H-Y-R-T-A-L-S-N-G-F-R-E-G-P-E-S-C-I-V-L-L-V-L-A-L-G-Q-A-S-L-R-G-S-I-S-R-I-V-P-X-E-D-P-P-G-L-Q-Y-F-T-A-A-W-X-L-L-P-G-M-M-T-X-N-S-V-L-A-A-Q-C-H-L-L-A-A-A-Y-L-F-Y-L-V-R-P-L-E-A-W-N-L-L-C-T-T-S-T-K-L-Q-L-L-L-M-A-P-N-R-V-P-P-X-Q-R-E-L-S-E-R-I-Y-W-N-A-L-L-F-E-S-D-L-L-A-E-L-D-L-P-H-S-G-V-Q-F-E-E-N-V-G-L-P-G-G-F-E-G-E-E-D-E-X-D-E-E-A-D-X-D-Q-E-I-A-X-V-T-A-V-G-R-D-E-L-W-Y-F-L-A-E-I-A-L-R-R-L-L-N-R-V-S-Q-L-I-Y-S-K-D-T-P-Y-S-K-G-P-S-M-A-S-T-T-S-L-E-P-I-V-A-E-L-D-F-Q-L-T-Q-W-Y-E (SEQ ID NO: 237), where X can be any amino acid residue (FIG. 21). Clr-2 polypeptides of the present disclosure, and homologs thereof, contain a “PFAM04082 transcription factor domain” that includes the following conserved sequence: I-D-A-Y-F-K-R-V-H-X-F-X-P-M-L-D-E-X-T-F-R-A-T-Y-L-E-G-Q-R-K-D-A-P-W-L-A-L-L-N-M-V-F-A-L-G-S-I-A-A-M-K-S-D-D-Y-N-H-X-X-Y-Y-N-R-A-M-E-H-L-X-L-D-S-F-G-S-S-H-X-E-T-V-Q-A-L-A-L-M-G-G-Y-Y-L-H-Y-I-N-R-P-N-X-A-N-A-L-M-G-A-A-L-R-M-A-S-A-L-G-L-H-R-E-S-L-A-Q-X-X-A-S-S-Q-K-G-V-N-X-S-D-X-A-S-A-E-T-R-R-R-T-W-W-S-L-F-C-L-D-T-W-A-T-T-T-L-G-R-P-S-X-G-R-W-G (SEQ ID NO: 238), where X can be any amino acid residue (FIG. 22).

[0123] Accordingly, in certain embodiments, clr-1 polypeptides of the present disclosure have a zinc(2)-cysteine(6) binuclear cluster domain having the following conserved sequence: C-E-V-C-R-S-R-K-S-R-C-D-G-T-K-P-K-C-K-L-C-T-E-L-G-A-E-C-I-Y-R-E (SEQ ID NO: 235); and a PFAM04082 transcription factor domain having the following conserved sequence: I-E-A-Y-F-E-R-V-N-V-W-Y-A-C-V-N-P-Y-T-W-R-S-H-Y-R-T-A-L-S-N-G-F-R-E-G-P-E-S-C-I-V-L-L-V-L-A-L-G-Q-A-S-L-R-G-S-I-S-R-I-V-P-X-E-D-P-P-G-L-Q-Y-F-T-A-A-W-X-L-L-P-G-M-M-T-X-N-S-V-L-A-A-Q-C-H-L-L-A-A-A-Y-L-F-Y-L-V-R-P-L-E-A-W-N-L-L-C-T-T-S-T-K-L-Q-L-L-L-M-A-P-N-R-V-P-P-X-Q-R-E-L-S-E-R-I-Y-W-N-A-L-L-F-E-S-D-L-L-A-E-L-D-L-P-H-S-G-I-V-Q-F-E-E-N-V-G-L-P-G-G-F-E-G-E-E-D-E-X-D-E-E-A-D-X-D-Q-E-I-A-X-V-T-A-V-G-R-D-E-L-W-Y-F-L-A-E-A-L-R-R-L-L-N-R-V-S-Q-L-I-Y-S-K-D-T-P-Y-S-K-G-P-S-M-A-S-T-T-S-L-E-P-I-V-A-E-L-D-F-Q-L-T-Q-W-Y-E (SEQ ID NO: 237).

[0124] Clr-1 polypeptides of the present disclosure include, without limitation, the polypeptide sequences of NCU07705 (SEQ ID NO: 1), XP_{—}755084.1 (SEQ ID NO: 23), AN5808 (SEQ ID NO: 24), CAK44822.1 (SEQ ID NO: 25), BAE65369.1 (SEQ ID NO: 26), XP_{—}001555641.1 (SEQ ID NO: 27), XP_{—}001223845.1 (SEQ ID NO: 28), XP_{—}385244.1 (SEQ ID NO: 29), EFQ33187.1 (SEQ ID NO: 30), EFX05743.1 (SEQ ID NO: 31), CBY01925.1 (SEQ ID NO: 32), XP_{—}363808.2 (SEQ ID NO: 33), XP_{—}003046557.1 (SEQ ID NO: 34), NCU00808 (SEQ ID NO: 35), XP_{—}002561618.1 (SEQ ID NO: 36), XP_{—}001793692.1 (SEQ ID NO: 37), XP_{—}001910210.1 (SEQ ID NO: 38), XP_{—}003302859.1 (SEQ ID NO: 39), XP_{—}001941914.1 (SEQ ID NO: 40), XP_{—}001586051.1 (SEQ ID NO: 41), XP_{—}003349955.1 (SEQ ID NO: 42), SEQ ID NO: 43, XP_{—}003009138.1 (SEQ ID NO: 44), XP_{—}002147949.1 (SEQ ID NO: 45), XP_{—}002481929.1 (SEQ ID NO: 46), EFY98315.1 (SEQ ID NO: 47), EGO59041.1 (SEQ ID NO: 48), XP_{—}001267691.1 (SEQ ID NO: 15), XP_{—}002378199.1 (SEQ ID NO: 16), CAK44822.1 (SEQ ID NO: 17), BAE65369.1 (SEQ ID NO: 18), XP_{—}001209542.1 (SEQ ID NO: 19), EFY86844.1 (SEQ ID NO: 20), EGP86518.1 (SEQ ID NO: 21), XP_{—}001260268.1 (SEQ ID NO: 22), and Trichoderma reesei clr-1 (SEQ ID NO: 182).

[0125] Clr-1 polypeptides of the present disclosure also include polypeptides that are homologs of clr-1 proteins identified herein. In some aspects, the present disclosure relates to polypeptides that are homologs of N. crassa clr-1, homologs of Aspergillus nidulans clrA, and/or homologs of Trichoderma reesei clr-1. Methods for identification of polypeptides that are homologs of a polypeptide of interest are well known to one of skill in the art, as described herein.

[0126] Clr-1 polypeptides of the present disclosure further include polypeptides containing an amino acid sequence having at least 10%, at least 15%, at least 20%, at least 25%, at least 30%, at least 35%, at least 40%, at least 45%, at least 50%, at least 55%, at least 60%, at least 65%, at least 70%, at least 75%, at least 80%, at least 85%, at least 90%, at least 95%, at least 98%, at least 99%, or 100% identity to the sequence of SEQ ID NO: 1, SEQ ID NO: 24, or SEQ ID NO: 182. Polypeptides of the disclosure also include polypeptides having at least 10, at least 12, at least 14, at least 16, at least 18, or at least 20 consecutive amino acids of SEQ ID NO: 1, SEQ ID NO: 24, or SEQ ID NO: 182.

[0127] A clr-1 polypeptide of the present disclosure includes, without limitation, clr-1 of Neurospora crassa (N. crassa), which has the gene name NCU07705 (SEQ ID NO: 1). The zinc(2)-cysteine(6) domain of N. crassa clr-1 corresponds to about amino acids 134-166 of SEQ ID NO: 1. The conserved central domain of N. crassa clr-1 corresponds to about amino acids 313-549 of SEQ ID NO: 1. The zinc(2)-cysteine(6) domain and conserved central domain of other clr-1 polypeptides may be determined by aligning a clr-1 sequence of interest to the amino acid sequence of N. crassa clr-1, and identifying the amino acids in a sequence of interest which align with amino acids 134-166 and 313-549 of SEQ ID NO: 1. Another clr-1 polypeptide of the present disclosure includes, without limitation, clrA of Aspergillus nidulans, which has the gene name AN5808 (SEQ ID NO: 24). A further clr-1 polypeptide of the present disclosure includes, without limitation, clr-1 of Trichoderma reesei (SEQ ID NO: 182).

[0128] Clr-1 Sequence Motifs

[0129] The amino acid sequences of N. crassa clr-1 and 22 clr-1 homologs were aligned with the MAFFT alignment algorithm, (CBRC mafft website) and alignments were manually inspected for regions of conservation outside of known conserved domains in likely orthologs, as determined by phylogenetic analysis. The analysis identified five conserved sequence motifs. The first conserved sequence is: A-G-D-[KR]-[LM]-I-[LI]-[ED]-[RKQH]-L-N-R-I-E-[SNG]-L-L (SEQ ID NO: 188). The second conserved sequence is: H-[HR]-[ADE]-G-H-[MLI]-P-Y-[IL]-[WF]-Q-G-A-L-S-[MI]-[VMI] (SEQ ID: 189). The third conserved sequence is: [NP]-[PS]-[LKTS]-K-[RK]-[RK]-[NSP]-[TSN]-[EDST]-X-X-[VIAT]-[DE]-Y-P (SEQ ID NO: 190), where X can be any amino acid residue. The fourth conserved sequence is: G-[GTSVN]-[FLI]-G-[TS]-W-[SNVAT]-[ANS]-[QTP]-[PA]-[TS] (SEQ ID NO: 191). The fifth conserved sequence is: R-[NH]-[LM]-[ST]-[QP]-[STP]-[SP]-[DE] (SEQ ID NO: 192). As an example of how to such motifs, the following motif, R-[NH]-[LM]-[ST]-[QP]-[STP]-[SP]-[DE] (SEQ ID NO: 192), is translated as: Arg-[Asn or His]-[Leu or Met]-[Ser or Thr]-[Gln or Pro]-[Ser, Thr, or Pro]-[Ser or Pro]-[Asp, or Glu] (SEQ ID NO: 192). These conserved motifs can be used to identify further clr-1 transcription factors.

[0130] Accordingly, in certain embodiments, clr-1 transcription factor proteins of the present disclosure contain a zinc(2)-cysteine(6) binuclear cluster domain, a PFAM04082 transcription factor domain, and at least one, at least two, at least three, at least four, or at least five polypeptide sequence selected from SEQ ID NOs: 188, 189, 190, 191, and 192.

[0131] Clr-2

[0132] In some aspects, the present disclosure relates to clr-2 polypeptides. Clr-2 polypeptides function as transcription factors that regulate the transcription of various genes in a fungal cell in response to the exposure of the cell to cellulose. In some aspects, the expression of a gene is increased in response to clr-2 expression. In some aspects, the expression of a gene is decreased in response to clr-2 expression.

[0133] Clr-2 is a member of the fungal specific zinc binuclear cluster superfamily, which is large, diverse superfamily of fungal-specific transcriptional regulators. Examples of transcription factors in this superfamily include gal-4, ace-1, and xlnR (xyr-1) (Stricker A R, et al., App. Micro. Biotech., 78: 211-220 (2008)). Clr-1 is also a member of this superfamily.

[0134] Members of this polypeptide superfamily typically contain two conserved domains: A) a zinc(2)-cysteine(6) binuclear cluster domain, which coordinates binding of the polypeptide to the DNA, and B) a central domain, which roughly corresponds to what is known as the “middle homology region” (Campbell R N, Biochemical J., 414: 177-187, (2008)), a conserved domain in zinc finger transcription factors. In clr-2, the conserved central domain has the fungal-specific transcription factor domain PFAM04082.

[0135] In certain embodiments, clr-2 polypeptides of the present disclosure have a zinc(2)-cysteine(6) binuclear cluster domain having the following conserved sequence: C-A-E-C-R-R-R-K-I-R-C-D-G-E-Q-PC-G-Q-C-X-W-Y-X-K-P-K-R-C-F-Y-R-V-X-P-S-R-K (SEQ ID NO: 236); and a PFAM04082 transcription factor domain having the following conserved sequence: I-D-A-Y-F-K-R-V-H-X-F-X-P-M-L-D-E-X-T-F-R-A-T-Y-L-E-G-Q-R-K-D-A-P-W-L-A-L-L-N-M-V-F-A-L-G-S-A-A-M-K-S-D-D-Y-N-H-X-X-Y-Y-N-R-A-M-E-H-L-X-L-D-S-F-G-S-S-H-X-E-T-V-Q-A-L-A-L-M-G-G-Y-Y-L-H-Y-I-N-R-P-N-X-A-N-A-L-M-G-A-A-L-R-M-A-S-A-L-G-L-H-R-E-S-L-A-Q-X-X-A-S-S-Q-K-G-V-N-X-S-D-X-A-S-A-E-T-R-R-R-T-W-W-S-L-F-C-L-D-T-W-A-T-T-T-L-G-R-P-S-X-G-R-W-G (SEQ ID NO: 238).

[0136] Clr-2 polypeptides of the present disclosure include the polypeptide sequences of NCU08042 (SEQ ID NO: 4), CAE85541.1 (SEQ ID NO: 69), XP_{—}003347695.1 (SEQ ID NO: 70), XP_{—}001910304.1 (SEQ ID NO: 71), XP_{—}001223809.1 (SEQ ID NO: 72), EFQ33148.1 (SEQ ID NO: 73), XP_{—}363907.1 (SEQ ID NO: 74), XP_{—}003006605.1 (SEQ ID NO: 75), XP_{—}003039508.1 (SEQ ID NO: 76), XP_{—}001558061.1 (SEQ ID NO: 77), XP_{—}003299229.1 (SEQ ID NO: 78), CBX99480.1 (SEQ ID NO: 79), XP_{—}001395273.2 (SEQ ID NO: 80), XP_{—}384856.1 (SEQ ID NO: 81), XP_{—}003191005.1 (SEQ ID NO: 82), XP_{—}002568399.1 (SEQ ID NO: 83), EDP48079.1 (SEQ ID NO: 84), AN3369 (SEQ ID NO: 85), XP_{—}003065241.1 (SEQ ID NO: 86), XP_{—}001240945.1 (SEQ ID NO: 87), XP_{—}002542864.1 (SEQ ID NO: 88), XP_{—}002480618.1 (SEQ ID NO: 89), XP_{—}001940688.1 (SEQ ID NO: 90), XP_{—}002151678.1 (SEQ ID NO: 91), EFY98873.1 (SEQ ID NO: 92), XP_{—}001590666.1 (SEQ ID NO: 93), EGR49862 (SEQ ID NO: 94), XP_{—}961763.2 (SEQ ID NO: 95), EGO59545.1 (SEQ ID NO: 96), SEQ ID NO: 97, CAK48469.1 (SEQ ID NO: 49), EFW15774.1 (SEQ ID NO: 50), XP_{—}003040361.1 (SEQ ID NO: 51), XP_{—}002561020.1 (SEQ ID NO: 52), XP_{—}003009097.1 (SEQ ID NO: 53), XP_{—}003001732.1 (SEQ ID NO: 54), XP_{—}001272415.1 (SEQ ID NO: 55), XP_{—}001268264.1 (SEQ ID NO: 56), XP_{—}002384489.1 (SEQ ID NO: 57), XP_{—}001217271.1 (SEQ ID NO: 58), XP_{—}001214698.1 (SEQ ID NO: 59), XP_{—}001218515.1 (SEQ ID NO: 60), EGP89821.1 (SEQ ID NO: 61), XP_{—}001262768.1 (SEQ ID NO: 62), XP_{—}001258355.1 (SEQ ID NO: 63), EDP49780.1 (SEQ ID NO: 64), XP_{—}746801.1 (SEQ ID NO: 65), XP_{—}751092.1 (SEQ ID NO: 66), AN6832 (SEQ ID NO: 67), and EFQ30604.1 (SEQ ID NO: 68).

[0137] Clr-2 polypeptides of the present disclosure also include polypeptides that are homologs of clr-2 proteins identified herein. In some aspects, the present disclosure relates to polypeptides that are homologs of N. crassa clr-2 and/or homologs of Aspergillus nidulans clrB. Methods for identification of polypeptides that are homologs of a polypeptide of interest are well known to one of skill in the art, as described herein.

[0138] Clr-2 polypeptides of the present disclosure further include polypeptides containing an amino acid sequence having at least 10%, at least 15%, at least 20%, at least 25%, at least 30%, at least 35%, at least 40%, at least 45%, at least 50%, at least 55%, at least 60%, at least 65%, at least 70%, at least 75%, at least 80%, at least 85%, at least 90%, at least 95%, at least 98%, at least 99%, or 100% identity to the sequence of SEQ ID NO: 4 or SEQ ID NO: 85. Polypeptides of the disclosure also include polypeptides having at least 10, at least 12, at least 14, at least 16, at least 18, or at least 20 consecutive amino acids of SEQ ID NO: 4 or SEQ ID NO: 85.

[0139] A clr-2 polypeptide of the present disclosure includes, without limitation, clr-2 of N. crassa, which has the gene name NCU08042 (SEQ ID NO: 4). The zinc(2)-cysteine(6) domain of N. crassa clr-2 corresponds to about amino acids 48-86 of SEQ ID NO: 4. The conserved central domain of N. crassa clr-2 corresponds to about amino acids 271-427 of SEQ ID NO: 4. The zinc(2)-cysteine(6) domain and conserved central domain of other clr-2 polypeptides may be determined by aligning a clr-2 sequence of interest to the sequence of N. crassa clr-2, and identifying the amino acids in a sequence of interest which align with amino acids 48-86 and 271-427 of SEQ ID NO: 4. Another clr-2 polypeptide of the present disclosure includes, without limitation, clrB of Aspergillus nidulans, which has the gene name AN3369 (SEQ ID NO: 85).

[0140] Clr-2 Sequence Motifs

[0141] The amino acid sequences of N. crassa clr-2 and 21 clr-2 homologs were aligned with the MAFFT alignment algorithm, (CBRC mafft website) and alignments were manually inspected for regions of conservation outside of known conserved domains in likely orthologs, as determined by phylogenetic analysis. The analysis identified five conserved sequence motifs. The analysis identified four conserved sequence motifs. The first conserved sequence is: [VL]-[ED]-[KAE]-L-S-[QTSN]-[STN]-[LVI]-[DE]-[DE]-[YC]-[RK]-[STV] (SEQ ID NO: 184). The second conserved sequence is: [MLI]-[STI]-G-W-N-A-V-W-[FLW]-[IVLCT]-[FY]-Q-[AS]-X-[ML]-[VI]-P-L-[ILV] (SEQ ID: 185), where X can be any amino acid residue. The third conserved sequence is: [ED]-X-L-[AV]-[AVI]-[STAL] (SEQ ID NO: 186), where X can be any amino acid residue. The fourth conserved sequence is: M-[FY]-[HIL]-T-F-[QE] (SEQ ID NO: 187). As an example of how to such motifs, the following motif, M-[FY]-[HIL]-T-F-[QE](SEQ ID NO: 187), is translated as: Met-[Phe or Tyr]-[His, Ile, or Leu]-Thr-Phe-[Gln or Glu]. These conserved motifs can be used to identify further clr-2 transcription factors.

[0142] Accordingly, in certain embodiments, clr-2 transcription factor proteins of the present disclosure contain a zinc(2)-cysteine(6) binuclear cluster domain, a PFAM04082 transcription factor domain, and at least one, at least two, at least three, or at least four polypeptide sequence selected from SEQ ID NOs: 184, 185, 186, and 187.

[0143] Genes Under Regulatory Control of Clr-1 and Clr-2

[0144] Clr-1 and clr-2 function as transcription factors for genes involved in the detection and metabolic response of a cell to the presence of cellulose. In some aspects, clr-1 and clr-2 are involved in the regulation of genes encoding cellulases. In some aspects, clr-1 and clr-2 are involved in the regulation of genes encoding polysaccharide active enzymes. In some aspects, clr-1 and clr-2 are involved in the regulation of genes encoding transport proteins. In some aspects, clr-1 and clr-2 are involved in the regulation of genes encoding proteins involved in protein synthesis and/or secretion. In some aspects, clr-1 and clr-2 are involved in the regulation of genes encoding hemicellulases. Genes under the regulatory control of clr-1 and/or clr-2 are further described in Table 1A-1E. In some aspects, the expression of a gene under the control of clr-1 and/or clr-2 is increased in response to clr-1 and/or clr-2 expression. In some aspects, the expression of a gene under the control of clr-1 and/or clr-2 is decreased in response to clr-1 and/or clr-2 expression.

[0145] Advantageously, mis-expression of clr-2 in a filamentous fungal cell induces expression of one or more cellulase genes under non-inducing or starvation conditions, resulting in increased secretion of one or more cellulases from the cell. For example, the non-inducing or starvation conditions may include, without limitation, culturing the filamentous fungal cell in the absence of any easily usable carbon source, such as cellulose or cellobiose; and culturing the filamentous fungal cell in the presence of a preferred carbon source, such as sucrose.

[0146] As used herein, “mis-expression” of a gene refers to expression of a gene under conditions where the gene is not normally expressed, such as under non-inducing conditions. Mis-expression may include, without limitation, recombinant expression, constitutive expression, inducible expression, heterologous expression, and over-expression.

### Polynucleotides of the Disclosure

[0147] The present disclosure further relates to polynucleotides that encode clr-1 and clr-2 polypeptides. Polynucleotides that encode a polypeptide are also referred to herein as “genes”. Methods for determining the relationship between a polypeptide and a polynucleotide that encodes the polypeptide are well known to one of skill in the art. Similarly, methods of determining the polypeptide sequence encoded by a polynucleotide sequence are well known to one of skill in the art.

[0148] As used herein, the terms “polynucleotide”, “nucleic acid sequence”, “nucleic acid”, and variations thereof shall be generic to polydeoxyribonucleotides (containing 2-deoxy-D-ribose), to polyribonucleotides (containing D-ribose), to any other type of polynucleotide that is an N-glycoside of a purine or pyrimidine base, and to other polymers containing non-nucleotidic backbones, provided that the polymers contain nucleobases in a configuration that allows for base pairing and base stacking, as found in DNA and RNA. Thus, these terms include known types of nucleic acid sequence modifications, for example, substitution of one or more of the naturally occurring nucleotides with an analog, and inter-nucleotide modifications. As used herein, the symbols for nucleotides and polynucleotides are those recommended by the IUPAC-IUB Commission of Biochemical Nomenclature.

[0149] Clr-1

[0150] The present disclosure relates to polynucleotides that encode a clr-1 polypeptide. In some aspects, the disclosure relates to polynucleotides that encode the polypeptides of NCU07705 (SEQ ID NO: 1), XP_{—}755084.1 (SEQ ID NO: 23), AN5808 (SEQ ID NO: 24), CAK44822.1 (SEQ ID NO: 25), BAE65369.1 (SEQ ID NO: 26), XP_{—}001555641.1 (SEQ ID NO: 27), XP_{—}001223845.1 (SEQ ID NO: 28), XP_{—}385244.1 (SEQ ID NO: 29), EFQ33187.1 (SEQ ID NO: 30), EFX05743.1 (SEQ ID NO: 31), CBY01925.1 (SEQ ID NO: 32), XP_{—}363808.2 (SEQ ID NO: 33), XP_{—}003046557.1 (SEQ ID NO: 34), NCU00808 (SEQ ID NO: 35), XP_{—}002561618.1 (SEQ ID NO: 36), XP_{—}001793692.1 (SEQ ID NO: 37), XP_{—}001910210.1 (SEQ ID NO: 38), XP_{—}003302859.1 (SEQ ID NO: 39), XP_{—}001941914.1 (SEQ ID NO: 40), XP_{—}001586051.1 (SEQ ID NO: 41), XP_{—}003349955.1 (SEQ ID NO: 42), SEQ ID NO: 43, XP_{—}003009138.1 (SEQ ID NO: 44), XP_{—}002147949.1 (SEQ ID NO: 45), XP_{—}002481929.1 (SEQ ID NO: 46), EFY98315.1 (SEQ ID NO: 47), EGO59041.1 (SEQ ID NO: 48), XP_{—}001267691.1 (SEQ ID NO: 15), XP_{—}002378199.1 (SEQ ID NO: 16), CAK44822.1 (SEQ ID NO: 17), BAE65369.1 (SEQ ID NO: 18), XP_{—}001209542.1 (SEQ ID NO: 19), EFY86844.1 (SEQ ID NO: 20), EGP86518.1 (SEQ ID NO: 21), XP_{—}001260268.1 (SEQ ID NO: 22), and Trichoderma reesei clr-1 (SEQ ID NO: 182).

[0151] In some aspects, a polynucleotide of the disclosure is a polynucleotide that encodes the N. crassa clr-1 polypeptide. An example of a polynucleotide that encodes the N. crassa clr-1 polypeptide is SEQ ID NO: 2. In other aspects, a polynucleotide of the disclosure is a polynucleotide that encodes the Aspergillus nidulans clrA polypeptide. An example of a polynucleotide that encodes the Aspergillus nidulans clrA polypeptide is SEQ ID NO: 119. In further aspects, a polynucleotide of the disclosure is a polynucleotide that encodes the Trichoderma reesei clr-1 polypeptide. An example of a polynucleotide that encodes the Trichoderma reesei clr-1 polypeptide is SEQ ID NO: 183.

[0152] Polynucleotides of the disclosure also include polynucleotides having at least 10%, at least 15%, at least 20%, at least 25%, at least 30%, at least 35%, at least 40%, at least 45%, at least 50%, at least 55%, at least 60%, at least 65%, at least 70%, at least 75%, at least 80%, at least 85%, at least 90%, at least 95%, at least 98%, at least 99%, or 100% identity to the sequence of SEQ ID NO: 2, SEQ ID NO: 119, or SEQ ID NO: 183. Polynucleotides of the disclosure also include polynucleotides that have at least 10, at least 12, at least 14, at least 16, at least 18, at least 20, at least 22, at least 24, at least 26, at least 28, or at least 30 consecutive nucleotides of SEQ ID NO: 2, SEQ ID NO: 119, or SEQ ID NO: 183.

[0153] Polynucleotides of the disclosure further include fragments of polynucleotides that encode clr-1 polypeptides, polynucleotides that are complementary to polynucleotides that encode clr-1 polypeptides, and fragments of polynucleotides that are complementary to polynucleotides that encode clr-1 polypeptides.

[0154] Polynucleotides of the disclosure also include polynucleotides that encode polypeptides containing an amino acid sequence having at least 10%, at least 15%, at least 20%, at least 25%, at least 30%, at least 35%, at least 40%, at least 45%, at least 50%, at least 55%, at least 60%, at least 65%, at least 70%, at least 75%, at least 80%, at least 85%, at least 90%, at least 95%, at least 98%, at least 99%, or 100% identity to the sequence of SEQ ID NO: 1, SEQ ID NO: 24, or SEQ ID NO: 182. Polynucleotides of the disclosure also include polynucleotides that encode polypeptides having at least 10, at least 12, at least 14, at least 16, at least 18, or at least 20 consecutive amino acids of SEQ ID NO: 1, SEQ ID NO: 24, or SEQ ID NO: 182.

[0155] Polynucleotides of the disclosure that encode a clr-1 polypeptide also include polynucleotides having at least 10%, at least 15%, at least 20%, at least 25%, at least 30%, at least 35%, at least 40%, at least 45%, at least 50%, at least 55%, at least 60%, at least 65%, at least 70%, at least 75%, at least 80%, at least 85%, at least 90%, at least 95%, at least 98%, at least 99%, or 100% identity to any of the sequences of SEQ ID NOs: 98-132. Polynucleotides of the disclosure also include polynucleotides that have at least 10, at least 12, at least 14, at least 16, at least 18, at least 20, at least 22, at least 24, at least 26, at least 28, or at least 30 consecutive nucleotides of any of the sequences of SEQ ID NOs: 98-132.

[0156] Clr-2

[0157] The present disclosure relates to polynucleotides that encode a clr-2 polypeptide. In some aspects, the disclosure relates to polynucleotides that encode the polypeptides of NCU08042 (SEQ ID NO: 4), CAE85541.1 (SEQ ID NO: 69), XP_{—}003347695.1 (SEQ ID NO: 70), XP_{—}001910304.1 (SEQ ID NO: 71), XP_{—}001223809.1 (SEQ ID NO: 72), EFQ33148.1 (SEQ ID NO: 73), XP_{—}363907.1 (SEQ ID NO: 74), XP_{—}003006605.1 (SEQ ID NO: 75), XP_{—}003039508.1 (SEQ ID NO: 76), XP_{—}001558061.1 (SEQ ID NO: 77), XP_{—}003299229.1 (SEQ ID NO: 78), CBX99480.1 (SEQ ID NO: 79), XP_{—}001395273.2 (SEQ ID NO: 80), XP_{—}384856.1 (SEQ ID NO: 81), XP_{—}003191005.1 (SEQ ID NO: 82), XP_{—}002568399.1 (SEQ ID NO: 83), EDP48079.1 (SEQ ID NO: 84), AN3369 (SEQ ID NO: 85), XP_{—}003065241.1 (SEQ ID NO: 86), XP_{—}001240945.1 (SEQ ID NO: 87), XP_{—}002542864.1 (SEQ ID NO: 88), XP_{—}002480618.1 (SEQ ID NO: 89), XP_{—}001940688.1 (SEQ ID NO: 90), XP_{—}002151678.1 (SEQ ID NO: 91), EFY98873.1 (SEQ ID NO: 92), XP_{—}001590666.1 (SEQ ID NO: 93), EGR49862 (SEQ ID NO: 94), XP_{—}961763.2 (SEQ ID NO: 95), EGO59545.1 (SEQ ID NO: 96), SEQ ID NO: 97, CAK48469.1 (SEQ ID NO: 49), EFW15774.1 (SEQ ID NO: 50), XP_{—}003040361.1 (SEQ ID NO: 51), XP_{—}002561020.1 (SEQ ID NO: 52), XP_{—}003009097.1 (SEQ ID NO: 53), XP_{—}003001732.1 (SEQ ID NO: 54), XP_{—}001272415.1 (SEQ ID NO: 55), XP_{—}001268264.1 (SEQ ID NO: 56), XP_{—}002384489.1 (SEQ ID NO: 57), XP_{—}001217271.1 (SEQ ID NO: 58), XP_{—}001214698.1 (SEQ ID NO: 59), XP_{—}001218515.1 (SEQ ID NO: 60), EGP89821.1 (SEQ ID NO: 61), XP_{—}001262768.1 (SEQ ID NO: 62), XP_{—}001258355.1 (SEQ ID NO: 63), EDP49780.1 (SEQ ID NO: 64), XP_{—}746801.1 (SEQ ID NO: 65), XP_{—}751092.1 (SEQ ID NO: 66), AN6832 (SEQ ID NO: 67), and EFQ30604.1 (SEQ ID NO: 68).

[0158] In some aspects, a polynucleotide of the disclosure is a polynucleotide that encodes the N. crassa clr-2 polypeptide. An example of polynucleotide that encodes the N. crassa clr-2 polypeptide is SEQ ID NO: 5. In other aspects, a polynucleotide of the disclosure is a polynucleotide that encodes the Aspergillus nidulans clrB polypeptide. An example of a polynucleotide that encodes the Aspergillus nidulans clrB polypeptide is SEQ ID NO: 165.

[0159] Polynucleotides of the disclosure also include polynucleotides having at least 10%, at least 15%, at least 20%, at least 25%, at least 30%, at least 35%, at least 40%, at least 45%, at least 50%, at least 55%, at least 60%, at least 65%, at least 70%, at least 75%, at least 80%, at least 85%, at least 90%, at least 95%, at least 98%, at least 99%, or 100% identity to the sequence of SEQ ID NO: 5 or SEQ ID NO: 165. Polynucleotides of the disclosure also include polynucleotides that have at least 10, at least 12, at least 14, at least 16, at least 18, at least 20, at least 22, at least 24, at least 26, at least 28, or at least 30 consecutive nucleotides of SEQ ID NO: 5 or SEQ ID NO: 165.

[0160] Polynucleotides of the disclosure further include fragments of polynucleotides that encode clr-2 polypeptides, polynucleotides that are complementary to polynucleotides that encode clr-2 polypeptides, and fragments of polynucleotides that are complementary to polynucleotides that encode clr-2 polypeptides.

[0161] Polynucleotides of the disclosure also include polynucleotides that encode polypeptides containing an amino acid sequence having at least 10%, at least 15%, at least 20%, at least 25%, at least 30%, at least 35%, at least 40%, at least 45%, at least 50%, at least 55%, at least 60%, at least 65%, at least 70%, at least 75%, at least 80%, at least 85%, at least 90%, at least 95%, at least 98%, at least 99%, or 100% identity to the sequence of SEQ ID NO: 4 or SEQ ID NO: 85. Polynucleotides of the disclosure also include polynucleotides that encode polypeptides having at least 10, at least 12, at least 14, at least 16, at least 18, or at least 20 consecutive amino acids of SEQ ID NO: 4 or SEQ ID NO: 85.

[0162] Polynucleotides of the disclosure that encode a clr-2 polypeptide also include polynucleotides having at least 10%, at least 15%, at least 20%, at least 25%, at least 30%, at least 35%, at least 40%, at least 45%, at least 50%, at least 55%, at least 60%, at least 65%, at least 70%, at least 75%, at least 80%, at least 85%, at least 90%, at least 95%, at least 98%, at least 99%, or 100% identity to any of the sequences of SEQ ID NOs: 133-181. Polynucleotides of the disclosure also include polynucleotides that have at least 10, at least 12, at least 14, at least 16, at least 18, at least 20, at least 22, at least 24, at least 26, at least 28, or at least 30 consecutive nucleotides of any of the sequences of SEQ ID NOs: 133-181.

### Sequence Homologs

[0163] As used herein, “homologs” are polypeptide or polynucleotide sequences that share a significant degree of sequence identity or similarity. Sequences that are homologs are referred to as being “homologous” to each other. Homologs include sequences that are orthologs or paralogs.

[0164] As used herein, “orthologs” are evolutionarily related polypeptide or polynucleotide sequences in different species that have similar sequences and functions, and that develop through a speciation event. Sequences that are orthologs are referred to as being “orthologous” to each other.

[0165] As used herein, “paralogs” are evolutionarily related polypeptide or polynucleotide sequences in the same organism that have similar sequences and functions, and that develop through a gene duplication event. Sequences that are paralogs are referred to as being “paralogous” to each other.

### Methods of Identification of Homologous Sequences/Sequence Identity and Similarity

[0166] Several different methods are known to those of skill in the art for identifying homologous sequences, including phylogenetic methods, sequence similarity analysis, and hybridization methods.

[0167] Phylogenetic Methods

[0168] Phylogenetic trees may be created for a gene family by using a program such as CLUSTAL (Thompson et al. Nucleic Acids Res. 22: 4673-4680 (1994); Higgins et al. Methods Enzymol 266: 383-402 (1996)) or MEGA (Tamura et al. Mol. Biol. & Evo. 24:1596-1599 (2007)). Once an initial tree for genes from one species is created, potential orthologous sequences can be placed in the phylogenetic tree and their relationships to genes from the species of interest can be determined. Evolutionary relationships may also be inferred using the Neighbor-Joining method (Saitou and Nei, Mol. Biol. & Evo. 4:406-425 (1987)). Homologous sequences may also be identified by a reciprocal BLAST strategy. Evolutionary distances may be computed using the Poisson correction method (Zuckerkandl and Pauling, pp. 97-166 in Evolving Genes and Proteins, edited by V. Bryson and H. J. Vogel. Academic Press, New York (1965)).

[0169] In addition, evolutionary information may be used to predict gene function. Functional predictions of genes can be greatly improved by focusing on how genes became similar in sequence (i.e. by evolutionary processes) rather than on the sequence similarity itself (Eisen, Genome Res. 8: 163-167 (1998)). Many specific examples exist in which gene function has been shown to correlate well with gene phylogeny (Eisen, Genome Res. 8: 163-167 (1998)). By using a phylogenetic analysis, one skilled in the art would recognize that the ability to deduce similar functions conferred by closely-related polypeptides is predictable.

[0170] When a group of related sequences are analyzed using a phylogenetic program such as CLUSTAL, closely related sequences typically cluster together or in the same clade (a group of similar genes). Groups of similar genes can also be identified with pair-wise BLAST analysis (Feng and Doolittle, J. Mol. Evol. 25: 351-360 (1987)). Analysis of groups of similar genes with similar function that fall within one clade can yield sub-sequences that are particular to the clade. These sub-sequences, known as consensus sequences, can not only be used to define the sequences within each clade, but define the functions of these genes; genes within a clade may contain paralogous sequences, or orthologous sequences that share the same function (see also, for example, Mount, Bioinformatics: Sequence and Genome Analysis Cold Spring Harbor Laboratory Press, Cold Spring Harbor, N.Y., page 543 (2001)).

[0171] To find sequences that are homologous to a reference sequence, BLAST nucleotide searches can be performed with the BLASTN program, score=100, wordlength=12, to obtain nucleotide sequences homologous to a nucleotide sequence encoding a protein of the disclosure. BLAST protein searches can be performed with the BLASTX program, score=50, wordlength=3, to obtain amino acid sequences homologous to a protein or polypeptide of the disclosure. To obtain gapped alignments for comparison purposes, Gapped BLAST (in BLAST 2.0) can be utilized as described in Altschul et al. (1997) Nucleic Acids Res. 25:3389. Alternatively, PSI-BLAST (in BLAST 2.0) can be used to perform an iterated search that detects distant relationships between molecules. See Altschul et al. (1997) supra. When utilizing BLAST, Gapped BLAST, or PSI-BLAST, the default parameters of the respective programs (e.g., BLASTN for nucleotide sequences, BLASTX for proteins) can be used.

[0172] Sequence Alignment/Sequence Similarity and Identity Analysis

[0173] Methods for the alignment of sequences and for the analysis of similarity and identity of polypeptide and polynucleotide sequences are well known in the art.

[0174] As used herein “sequence identity” refers to the percentage of residues that are identical in the same positions in the sequences being analyzed. As used herein “sequence similarity” refers to the percentage of residues that have similar biophysical/biochemical characteristics in the same positions (e.g. charge, size, hydrophobicity) in the sequences being analyzed.

[0175] Methods of alignment of sequences for comparison are well-known in the art, including manual alignment and computer assisted sequence alignment and analysis. This latter approach is a preferred approach in the present disclosure, due to the increased throughput afforded by computer assisted methods. As noted below, a variety of computer programs for performing sequence alignment are available, or can be produced by one of skill.

[0176] The determination of percent sequence identity and/or similarity between any two sequences can be accomplished using a mathematical algorithm. Non-limiting examples of such mathematical algorithms are the algorithm of Myers and Miller, CABIOS 4:11-17 (1988); the local homology algorithm of Smith et al., Adv. Appl. Math. 2:482 (1981); the homology alignment algorithm of Needleman and Wunsch, J. Mol. Biol. 48:443-453 (1970); the search-for-similarity-method of Pearson and Lipman, Proc. Natl. Acad. Sci. 85:2444-2448 (1988); the algorithm of Karlin and Altschul, Proc. Natl. Acad. Sci. USA 87:2264-2268 (1990), modified as in Karlin and Altschul, Proc. Natl. Acad. Sci. USA 90:5873-5877 (1993).

[0177] Computer implementations of these mathematical algorithms can be utilized for comparison of sequences to determine sequence identity and/or similarity. Such implementations include, but are not limited to: CLUSTAL in the PC/Gene program (available from Intelligenetics, Mountain View, Calif.); the AlignX program, version10.3.0 (Invitrogen, Carlsbad, Calif.) and GAP, BESTFIT, BLAST, FASTA, and TFASTA in the Wisconsin Genetics Software Package, Version 8 (available from Genetics Computer Group (GCG), 575 Science Drive, Madison, Wis., USA). Alignments using these programs can be performed using the default parameters. The CLUSTAL program is well described by Higgins et al. Gene 73:237-244 (1988); Higgins et al. CABIOS 5:151-153 (1989); Corpet et al., Nucleic Acids Res. 16:10881-90 (1988); Huang et al. CABIOS 8:155-65 (1992); and Pearson et al., Meth. Mol. Biol. 24:307-331 (1994). The BLAST programs of Altschul et al. J. Mol. Biol. 215:403-410 (1990) are based on the algorithm of Karlin and Altschul (1990) supra.

[0178] Hybridization Methods

[0179] Polynucleotides homologous to a reference sequence can be identified by hybridization to each other under stringent or under highly stringent conditions. Single stranded polynucleotides hybridize when they associate based on a variety of well characterized physical-chemical forces, such as hydrogen bonding, solvent exclusion, base stacking and the like. The stringency of a hybridization reflects the degree of sequence identity of the nucleic acids involved, such that the higher the stringency, the more similar are the two polynucleotide strands. Stringency is influenced by a variety of factors, including temperature, salt concentration and composition, organic and non-organic additives, solvents, etc. present in both the hybridization and wash solutions and incubations (and number thereof), as described in more detail in references cited below (e.g., Sambrook et al., Molecular Cloning: A Laboratory Manual, 2nd Ed., Vol. 1-3, Cold Spring Harbor Laboratory, Cold Spring Harbor, N.Y. (“Sambrook”) (1989); Berger and Kimmel, Guide to Molecular Cloning Techniques, Methods in Enzymology, vol. 152 Academic Press, Inc., San Diego, Calif. (“Berger and Kimmel”) (1987); and Anderson and Young, “Quantitative Filter Hybridisation.” In: Hames and Higgins, ed., Nucleic Acid Hybridisation, A Practical Approach. Oxford, TRL Press, 73-111 (1985)).

[0180] Encompassed by the disclosure are polynucleotide sequences that are capable of hybridizing to the disclosed polynucleotide sequences, including any polynucleotide within the Sequence Listing, and fragments thereof under various conditions of stringency (see, for example, Wahl and Berger, Methods Enzymol. 152: 399-407 (1987); and Kimmel, Methods Enzymo. 152: 507-511, (1987)). In addition to the nucleotide sequences in the Sequence Listing, full length cDNA, orthologs, and paralogs of the present nucleotide sequences may be identified and isolated using well-known polynucleotide hybridization methods.

[0181] With regard to hybridization, conditions that are highly stringent, and means for achieving them, are well known in the art. See, for example, Sambrook et al. (1989) (supra); Berger and Kimmel (1987) pp. 467-469 (supra); and Anderson and Young (1985)(supra).

[0182] Hybridization experiments are generally conducted in a buffer of pH between 6.8 to 7.4, although the rate of hybridization is nearly independent of pH at ionic strengths likely to be used in the hybridization buffer (Anderson and Young (1985)(supra)). In addition, one or more of the following may be used to reduce non-specific hybridization: sonicated salmon sperm DNA or another non-complementary DNA, bovine serum albumin, sodium pyrophosphate, sodium dodecylsulfate (SDS), polyvinyl-pyrrolidone, ficoll and Denhardt's solution. Dextran sulfate and polyethylene glycol 6000 act to exclude DNA from solution, thus raising the effective probe DNA concentration and the hybridization signal within a given unit of time. In some instances, conditions of even greater stringency may be desirable or required to reduce non-specific and/or background hybridization. These conditions may be created with the use of higher temperature, lower ionic strength and higher concentration of a denaturing agent such as formamide.

[0183] Stringency conditions can be adjusted to screen for moderately similar fragments such as homologous sequences from distantly related organisms, or to highly similar fragments such as genes that duplicate functional enzymes from closely related organisms. The stringency can be adjusted either during the hybridization step or in the post-hybridization washes. Salt concentration, formamide concentration, hybridization temperature and probe lengths are variables that can be used to alter stringency. As a general guidelines high stringency is typically performed at Tₘ−5° C. to Tₘ−20° C., moderate stringency at Tₘ−20° C. to Tₘ−35° C. and low stringency at Tₘ−35° C. to Tₘ−50° C. for duplex >150 base pairs. Hybridization may be performed at low to moderate stringency (25-50° C. below Tₘ), followed by post-hybridization washes at increasing stringencies. Maximum rates of hybridization in solution are determined empirically to occur at Tₘ−25° C. for DNA-DNA duplex and Tₘ−15° C. for RNA-DNA duplex. Optionally, the degree of dissociation may be assessed after each wash step to determine the need for subsequent, higher stringency wash steps.

[0184] High stringency conditions may be used to select for nucleic acid sequences with high degrees of identity to the disclosed sequences. An example of stringent hybridization conditions obtained in a filter-based method such as a Southern or northern blot for hybridization of complementary nucleic acids that have more than 100 complementary residues is about 5° C. to 20° C. lower than the thermal melting point (Tₘ) for the specific sequence at a defined ionic strength and pH.

[0185] Hybridization and wash conditions that may be used to bind and remove polynucleotides with less than the desired homology to the nucleic acid sequences or their complements that encode the present transcription factors include, for example: 6×SSC and 1% SDS at 65° C.; 50% formamide, 4×SSC at 42° C.; 0.5×SSC to 2.0×SSC, 0.1% SDS at 50° C. to 65° C.; or 0.1×SSC to 2×SSC, 0.1% SDS at 50° C.-65° C.; with a first wash step of, for example, 10 minutes at about 42° C. with about 20% (v/v) formamide in 0.1×SSC, and with, for example, a subsequent wash step with 0.2×SSC and 0.1% SDS at 65° C. for 10, 20 or 30 minutes.

[0186] For identification of less closely related homologs, wash steps may be performed at a lower temperature, e.g., 50° C. An example of a low stringency wash step employs a solution and conditions of at least 25° C. in 30 mM NaCl, 3 mM trisodium citrate, and 0.1% SDS over 30 min. Greater stringency may be obtained at 42° C. in 15 mM NaCl, with 1.5 mM trisodium citrate, and 0.1% SDS over 30 min. Wash procedures will generally employ at least two final wash steps. Additional variations on these conditions will be readily apparent to those skilled in the art (see, for example, US Patent Application No. 20010010913).

[0187] If desired, one may employ wash steps of even greater stringency, including conditions of 65° C.-68° C. in a solution of 15 mM NaCl, 1.5 mM trisodium citrate, and 0.1% SDS, or about 0.2×SSC, 0.1% SDS at 65° C. and washing twice, each wash step of 10, 20 or 30 min in duration, or about 0.1×SSC, 0.1% SDS at 65° C. and washing twice for 10, 20 or 30 min. Hybridization stringency may be increased further by using the same conditions as in the hybridization steps, with the wash temperature raised about 3° C. to about 5° C., and stringency may be increased even further by using the same conditions except the wash temperature is raised about 6° C. to about 9° C.

[0188] Polynucleotide probes may be prepared with any suitable label, including a fluorescent label, a colorimetric label, a radioactive label, or the like. Labeled hybridization probes for detecting related polynucleotide sequences may be produced, for example, by oligolabeling, nick translation, end-labeling, or PCR amplification using a labeled nucleotide.

### Host Cells of the Disclosure

[0189] The present disclosure further relates to host cells that contain a recombinant nucleic acid encoding a clr-1 polypeptide, clr-2 polypeptide, or clr-1 and clr-2 polypeptides.

[0190] “Host cell” and “host microorganism” are used interchangeably herein to refer to a living biological cell that can be transformed via insertion of recombinant DNA or RNA. Such recombinant DNA or RNA can be in an expression vector.

[0191] Any prokaryotic or eukaryotic host cell may be used in the present disclosure so long as it remains viable after being transformed with a sequence of nucleic acids. Preferably, the host cell is not adversely affected by the transduction of the necessary nucleic acid sequences, the subsequent expression of the proteins (e.g., transporters), or the resulting intermediates. Suitable eukaryotic cells include, but are not limited to, fungal, plant, insect or mammalian cells.

[0192] In some aspects, the host is a fungal strain. “Fungi” as used herein includes the phyla Ascomycota, Basidiomycota, Chytridiomycota, and Zygomycota as well as the Oomycota and all mitosporic fungi.

[0193] In some aspects, the host cell is fungus of the Ascomycota phylum. In some aspects, the host cell is of the genus Metarhizium, Gibberella, Nectria, Magnaporthe, Neurospora, Sordaria, Chaetomium, Podospora, Verticillium, Glomerella, Grosmannia, Sclerotinia, Botryotinia, Aspergillus, Aspergillus, Penicillium, Leptosphaeria, Phaeosphaeria, Pyrenophora, Penicillium, Talaromyces, Trichoderma, Uncinocarpus, Coccidioidesi, Saccharomyces, Schizosaccharomyces, Sporotrichum (Myceliophthora), Thielevia, Acremonium, Yarrowia, Hansenula, Kluyveromyces, Pichia, Mycosphaerella, Neosartorya, Thermomyces (Humicola, Monotospora, Sepedonium), or Chrysosporium.

[0194] In other aspects, the host cell is of the species Neurospora crassa, Metarhizium anisopliae, Metarhizium acridum, Gibberella zeae, Nectria haematococca, Magnaporthe oryzae, Neurospora tetrasperma, Sordaria macrospora, Chaetomium globosum, Podospora anserina, Verticillium albo-atrum, Glomerella graminicola, Grosmannia clavigera, Sclerotinia sclerotiorum, Botryotinia fuckeliana, Aspergillus clavatus, Aspergillus flavus, Aspergillus oryzae, Aspergillus nidulans, Aspergillus niger, Aspergillus fumigatus, Aspergillus terreus, Penicillium chrysogenum, Leptosphaeria maculans, Phaeosphaeria nodorum, Pyrenophora tritici-repentis, Pyrenophora teres, Penicillium marneffei, Talaromyces stipitatus, Trichoderma reesei, Uncinocarpus reesii, Coccidioides immitus, Coccidioides posadasii, Saccharomyces cerevisiae, Schizosaccharomyces pombe, Sporotrichum thermophile (Myceliophthora thermophila), Thielavia terrestris-thermophilic, Acremonium cellulolyticus, Yarrowia lipolytica, Hansenula polymorpha, Kluyveromyces lactis, Pichia pastoris, Mycosphaerella graminicola, Neosartoryafischeri, Thermomyces lanuginosus (Humicola brevis, Humicola brevispora, Humicola grisea, Humicola lanuginosa, Monotospora lanuginosa, Sepedonium lanuginosum), Talaromyces thermophilus (Talaromyces dupontii, Penicillium dupontii), or Chrysosporium lucknowense.

[0195] The host cells of the present disclosure may be genetically modified in that recombinant nucleic acids have been introduced into the host cells, and as such the genetically modified host cells do not occur in nature. The suitable host cell is one capable of expressing one or more nucleic acid constructs encoding one or more proteins for different functions.

[0196] “Recombinant nucleic acid” or “heterologous nucleic acid” or “recombinant polynucleotide”, “recombinant nucleotide” or “recombinant DNA” as used herein refers to a polymer of nucleic acids where at least one of the following is true: (a) the sequence of nucleic acids is foreign to (i.e., not naturally found in) a given host cell; (b) the sequence may be naturally found in a given host cell, but in an unnatural (e.g., greater than expected) amount; or (c) the sequence of nucleic acids contains two or more subsequences that are not found in the same relationship to each other in nature. For example, regarding instance (c), a recombinant nucleic acid sequence will have two or more sequences from unrelated genes arranged to make a new functional nucleic acid. Specifically, the present disclosure describes the introduction of an expression vector into a host cell, where the expression vector contains a nucleic acid sequence coding for a protein that is not normally found in a host cell or contains a nucleic acid coding for a protein that is normally found in a cell but is under the control of different regulatory sequences. With reference to the host cell's genome, then, the nucleic acid sequence that codes for the protein is recombinant. As used herein, the term “recombinant polypeptide” refers to a polypeptide generated from a “recombinant nucleic acid” or “heterologous nucleic acid” or “recombinant polynucleotide”, “recombinant nucleotide” or “recombinant DNA” as described above.

[0197] In some aspects, the host cell naturally produces any of the proteins encoded by the polynucleotides of the disclosure. The genes encoding the desired proteins may be heterologous to the host cell or these genes may be endogenous to the host cell but are operatively linked to heterologous promoters and/or control regions that result in the higher expression of the gene(s) in the host cell.

[0198] Host Cell Components

[0199] In some aspects, host cells of the disclosure contain a recombinant nucleic acid encoding a clr-1 polypeptide and/or a recombinant nucleic acid encoding a clr-2 polypeptide. In certain embodiments, the recombinant nucleic acid encoding a clr-1 polypeptide and/or recombinant nucleic acid encoding a clr-2 polypeptide is mis-expressed in the host cell (e.g., constitutively expressed, inducibly expressed, etc.). In other embodiments, a host cell that contains a recombinant nucleic acid encoding a clr-1 polypeptide and/or a recombinant nucleic acid encoding a clr-2 polypeptide contains a greater amount of clr-1 polypeptide and/or clr-2 polypeptide than a corresponding host cell that does not contain a recombinant nucleic acid encoding a clr-1 polypeptide and/or a recombinant nucleic acid encoding a clr-2 polypeptide. When a protein or nucleic acid is produced or maintained in a host cell at an amount greater than normal, the protein or nucleic acid is “overexpressed”. In some aspects, host cells of the disclosure overexpress clr-1 and/or clr-2. The present disclosure further is directed to cells that are modified and that have a greater level of clr-1 and/or clr-2 polypeptide than a corresponding cell that is not modified.

[0200] In some aspects, host cell of the disclosure contain a recombinant nucleic acid encoding a clr-2 transcription factor protein that contains a zinc(2)-cysteine(6) binuclear cluster domain, a PFAM04082 transcription factor domain, and at least one, at least two, at least three, or at least four polypeptide sequences selected from SEQ ID NOs: 184, 185, 186, and 187. In certain embodiments, the host cell may further contain at least one additional recombinant nucleic acid encoding a clr-1 transcription factor protein that contains a zinc(2)-cysteine(6) binuclear cluster domain, a PFAM04082 transcription factor domain, and at least one, at least two, at least three, at least four, or at least five polypeptide sequences selected from SEQ ID NOs: 188, 189, 190, 191, and 192.

[0201] In other aspects, host cell of the disclosure contain a recombinant nucleic acid encoding a clr-1 transcription factor protein that contains a zinc(2)-cysteine(6) binuclear cluster domain, a PFAM04082 transcription factor domain, and at least one, at least two, at least three, at least four, or at least five polypeptide sequences selected from SEQ ID NOs: 188, 189, 190, 191, and 192. In certain embodiments, the host cell may further contain at least one additional recombinant nucleic acid encoding a clr-2 transcription factor protein that contains a zinc(2)-cysteine(6) binuclear cluster domain, a PFAM04082 transcription factor domain, and at least one, at least two, at least three, or at least four polypeptide sequences selected from SEQ ID NOs: 184, 185, 186, and 187.

[0202] In some aspects, host cells of the disclosure contain a recombinant nucleic acid encoding a clr-1 polypeptide. In some aspects, host cells contain a recombinant nucleic acid encoding a clr-1 polypeptide having the amino acid sequence of any of: NCU07705 (SEQ ID NO: 1), XP_{—}755084.1 (SEQ ID NO: 23), AN5808 (SEQ ID NO: 24), CAK44822.1 (SEQ ID NO: 25), BAE65369.1 (SEQ ID NO: 26), XP_{—}001555641.1 (SEQ ID NO: 27), XP_{—}001223845.1 (SEQ ID NO: 28), XP_{—}385244.1 (SEQ ID NO: 29), EFQ33187.1 (SEQ ID NO: 30), EFX05743.1 (SEQ ID NO: 31), CBY01925.1 (SEQ ID NO: 32), XP_{—}363808.2 (SEQ ID NO: 33), XP_{—}003046557.1 (SEQ ID NO: 34), NCU00808 (SEQ ID NO: 35), XP_{—}002561618.1 (SEQ ID NO: 36), XP_{—}001793692.1 (SEQ ID NO: 37), XP_{—}001910210.1 (SEQ ID NO: 38), XP_{—}003302859.1 (SEQ ID NO: 39), XP_{—}001941914.1 (SEQ ID NO: 40), XP_{—}001586051.1 (SEQ ID NO: 41), XP_{—}003349955.1 (SEQ ID NO: 42), SEQ ID NO: 43, XP_{—}003009138.1 (SEQ ID NO: 44), XP_{—}002147949.1 (SEQ ID NO: 45), XP_{—}002481929.1 (SEQ ID NO: 46), EFY98315.1 (SEQ ID NO: 47), EGO59041.1 (SEQ ID NO: 48), XP_{—}001267691.1 (SEQ ID NO: 15), XP_{—}002378199.1 (SEQ ID NO: 16), CAK44822.1 (SEQ ID NO: 17), BAE65369.1 (SEQ ID NO: 18), XP_{—}001209542.1 (SEQ ID NO: 19), EFY86844.1 (SEQ ID NO: 20), EGP86518.1 (SEQ ID NO: 21), XP_{—}001260268.1 (SEQ ID NO: 22), or Trichoderma reesei clr-1 (SEQ ID NO: 182).

[0203] In some aspects, host cells contain a recombinant nucleic acid having the nucleic acid sequence of SEQ ID NO: 2, SEQ ID NO: 119, SEQ ID NO: 183, or any of SEQ ID NOs: 98-132.

[0204] In some aspects, host cells of the disclosure contain a recombinant nucleic acid encoding a clr-2 polypeptide. In some aspects, host cells contain a recombinant nucleic acid encoding a clr-2 polypeptide having the amino acid sequence of any of: NCU08042 (SEQ ID NO: 4), CAE85541.1 (SEQ ID NO: 69), XP_{—}003347695.1 (SEQ ID NO: 70), XP_{—}001910304.1 (SEQ ID NO: 71), XP_{—}001223809.1 (SEQ ID NO: 72), EFQ33148.1 (SEQ ID NO: 73), XP_{—}363907.1 (SEQ ID NO: 74), XP_{—}003006605.1 (SEQ ID NO: 75), XP_{—}003039508.1 (SEQ ID NO: 76), XP_{—}001558061.1 (SEQ ID NO: 77), XP_{—}003299229.1 (SEQ ID NO: 78), CBX99480.1 (SEQ ID NO: 79), XP_{—}001395273.2 (SEQ ID NO: 80), XP_{—}384856.1 (SEQ ID NO: 81), XP_{—}003191005.1 (SEQ ID NO: 82), XP_{—}002568399.1 (SEQ ID NO: 83), EDP48079.1 (SEQ ID NO: 84), AN3369 (SEQ ID NO: 85), XP_{—}003065241.1 (SEQ ID NO: 86), XP_{—}001240945.1 (SEQ ID NO: 87), XP_{—}002542864.1 (SEQ ID NO: 88), XP_{—}002480618.1 (SEQ ID NO: 89), XP_{—}001940688.1 (SEQ ID NO: 90), XP_{—}002151678.1 (SEQ ID NO: 91), EFY98873.1 (SEQ ID NO: 92), XP_{—}001590666.1 (SEQ ID NO: 93), EGR49862 (SEQ ID NO: 94), XP_{—}961763.2 (SEQ ID NO: 95), EGO59545.1 (SEQ ID NO: 96), SEQ ID NO: 97, CAK48469.1 (SEQ ID NO: 49), EFW15774.1 (SEQ ID NO: 50), XP_{—}003040361.1 (SEQ ID NO: 51), XP_{—}002561020.1 (SEQ ID NO: 52), XP_{—}003009097.1 (SEQ ID NO: 53), XP_{—}003001732.1 (SEQ ID NO: 54), XP_{—}001272415.1 (SEQ ID NO: 55), XP_{—}001268264.1 (SEQ ID NO: 56), XP_{—}002384489.1 (SEQ ID NO: 57), XP_{—}001217271.1 (SEQ ID NO: 58), XP_{—}001214698.1 (SEQ ID NO: 59), XP_{—}001218515.1 (SEQ ID NO: 60), EGP89821.1 (SEQ ID NO: 61), XP_{—}001262768.1 (SEQ ID NO: 62), XP_{—}001258355.1 (SEQ ID NO: 63), EDP49780.1 (SEQ ID NO: 64), XP_{—}746801.1 (SEQ ID NO: 65), XP_{—}751092.1 (SEQ ID NO: 66), AN6832 (SEQ ID NO: 67), or EFQ30604.1 (SEQ ID NO: 68).

[0205] In some aspects, host cells contain a recombinant nucleic acid having the nucleic acid sequence of SEQ ID NO: 5, SEQ ID NO: 165, or any of SEQ ID NOs: 133-181.

[0206] In some aspects, host cells of the current disclosure contain recombinant nucleic acids encoding a clr-1 polypeptide and a clr-2 polypeptide. In some aspects, host cells of the present disclosure contain recombinant nucleic acids encoding a clr-1 polypeptide having the amino acid sequence of SEQ ID NO: 1, SEQ ID NO: 24, or SEQ ID NO: 182, and a clr-2 polypeptide having the amino acid sequence of SEQ ID NO: 4 or SEQ ID NO: 85. In some aspects, host cells of the current disclosure contain recombinant nucleic acids having the nucleic acid sequences of SEQ ID NO: 2, SEQ ID NO: 119, or SEQ ID NO: 183, and SEQ ID NO: 5 or SEQ ID NO: 165.

[0207] Host cells of the disclosure may also be modified to reduce or inhibit expression of at least one gene involved in regulating protein secretion to increase secretion of proteins, such as cellulases. In some embodiments, the host cell is modified to reduce or inhibit expression of the catabolite repressor gene cre-1, or a homolog thereof. Techniques for modifying cells to reduce or inhibit expression of a gene are well known in the art and include, without limitation, those disclosed herein. Non-limiting examples include mutagenesis, RNAi, and antisense suppression.

[0208] Host cells of the disclosure may further contain one or more recombinant nucleic acid sequences encoding a hemicellulase. Hemicellulases include, without limitation, exoxylanases, endoxylanases, □-arabinofuranosidases, □-glucuronidases, □-xylosidases, and acetyl xylan esterases.

[0209] Host cells of the disclosure may further contain one or more recombinant nucleic acid sequences that encode a polypeptide in a biochemical pathway related to the production of a biofuel. In some aspects, a host cell contains a recombinant nucleic acid sequence encoding a polypeptide in a biochemical pathway involved in the production of ethanol, n-propanol, n-butanol, iso-butanol, 3-methyl-1-butanol, 2-methyl-1-butanol, 3-methyl-1-pentanol, and/or octanol.

### Methods of Producing and Culturing Host Cells of the Disclosure

[0210] Methods of producing and culturing host cells of the disclosure may include the introduction or transfer of expression vectors containing the recombinant nucleic acids of the disclosure into the host cell. Such methods for transferring expression vectors into host cells are well known to those of ordinary skill in the art. For example, one method for transforming cells with an expression vector involves a calcium chloride treatment where the expression vector is introduced via a calcium precipitate. Other salts, e.g., calcium phosphate, may also be used following a similar procedure. In addition, electroporation (i.e., the application of current to increase the permeability of cells to nucleic acid sequences) may be used to transfect the host cell. Cells also may be transformed through the use of spheroplasts (Schweizer, M, Proc. Natl. Acad. Sci., 78: 5086-5090 (1981). Also, microinjection of the nucleic acid sequences provides the ability to transfect host cells. Other means, such as lipid complexes, liposomes, and dendrimers, may also be employed. Those of ordinary skill in the art can transfect a host cell with a desired sequence using these or other methods.

[0211] In some cases, cells are prepared as protoplasts or spheroplasts prior to transformation. Protoplasts or spheroplasts may be prepared, for example, by treating a cell having a cell wall with enzymes to degrade the cell wall. Fungal cells may be treated, for example, with chitinase.

[0212] The vector may be an autonomously replicating vector, i.e., a vector which exists as an extrachromosomal entity, the replication of which is independent of chromosomal replication, e.g., a plasmid, an extrachromosomal element, a minichromosome, or an artificial chromosome. The vector may contain any means for assuring self-replication. Alternatively, the vector may be one which, when introduced into the host, is integrated into the genome and replicated together with the chromosome(s) into which it has been integrated. Furthermore, a single vector or plasmid or two or more vectors or plasmids that together contain the total DNA to be introduced into the genome of the host, or a transposon may be used.

[0213] The vectors preferably contain one or more selectable markers which permit easy selection of transformed hosts. A selectable marker is a gene the product of which provides, for example, biocide or viral resistance, resistance to heavy metals, prototrophy to auxotrophs, and the like. Selection of bacterial cells may be based upon antimicrobial resistance that has been conferred by genes such as the amp, gpt, neo, and hyg genes.

[0214] Selectable markers for use in fungal host cells include, but are not limited to, amdS (acetamidase), argB (ornithine carbamoyltransferase), bar (phosphinothricin acetyltransferase), hph (hygromycin phosphotransferase), niaD (nitrate reductase), pyrG (orotidine-5′-phosphate decarboxylase), sC (sulfate adenyltransferase), and trpC (anthranilate synthase), as well as equivalents thereof. Suitable markers for S. cerevisiae hosts are, for example, ADE2, HIS3, LEU2, LYS2, MET3, TRP1, and URA3.

[0215] The vectors may contain an element(s) that permits integration of the vector into the host's genome or autonomous replication of the vector in the cell independent of the genome.

[0216] For integration into the host genome, the vector may rely on the gene's sequence or any other element of the vector for integration of the vector into the genome by homologous or nonhomologous recombination. Alternatively, the vector may contain additional nucleotide sequences for directing integration by homologous recombination into the genome of the host. The additional nucleotide sequences enable the vector to be integrated into the host genome at a precise location(s) in the chromosome(s). To increase the likelihood of integration at a precise location, the integrational elements should contain a sufficient number of nucleic acids, such as 100 to 10,000 base pairs, 400 to 10,000 base pairs, or 800 to 10,000 base pairs, which are highly homologous with the corresponding target sequence to enhance the probability of homologous recombination. The integrational elements may be any sequence that is homologous with the target sequence in the genome of the host. Furthermore, the integrational elements may be non-encoding or encoding nucleotide sequences. On the other hand, the vector may be integrated into the genome of the host by non-homologous recombination.

[0217] For autonomous replication, the vector may further contain an origin of replication enabling the vector to replicate autonomously in the host in question. The origin of replication may be any plasmid replicator mediating autonomous replication which functions in a cell. The term “origin of replication” or “plasmid replicator” is defined herein as a sequence that enables a plasmid or vector to replicate in vivo.

[0218] The vector may further contain a promoter for regulation of expression of a recombinant nucleic acid of the disclosure in the vector. Promoters for the regulation of expression of a gene are well-known in the art, and include constitutive promoters, and inducible promoters. Promoters are described, for example, in Sambrook, et al. Molecular Cloning: A Laboratory Manual, 3rd edition, Cold Spring Harbor Laboratory Press, (2001). Promoter can be viral, bacterial, fungal, mammalian, or plant promoters. Additionally, promoters can be constitutive promoters, inducible promoters, environmentally regulated promoters, or developmentally regulated promoters. Examples of suitable promoters for regulating recombinant nucleic acid of the disclosure, such as clr-1 and clr-2, include, without limitation, the N. crassa ccg-1 constitutive promoter, which is responsive to the N. crassa circadian rhythm and nutrient conditions; the N. crassa gpd-I (glyceraldehyde 3-phosphate dehydrogenase-1) strong constitutive promoter; the N. crassa vvd (light) inducible promoter; the N. crassa qa-2 (quinic acid) inducible promoter; the Aspergillus nidulans gpdA promoter; the Aspergillus nidulans trpC constitutive promoter, the N. crassa tef-I (transcription elongation factor) highly constitutive promoter; and the N. crassa xlr-1 (XlnR homolog) promoter, which is used frequently in Aspergillus species.

[0219] More than one copy of a gene may be inserted into the host to increase production of the gene product. An increase in the copy number of the gene can be obtained by integrating at least one additional copy of the gene into the host genome or by including an amplifiable selectable marker gene with the nucleotide sequence where cells containing amplified copies of the selectable marker gene, and thereby additional copies of the gene, can be selected for by cultivating the cells in the presence of the appropriate selectable agent.

[0220] The procedures used to ligate the elements described above to construct the recombinant expression vectors of the present invention are well known to one skilled in the art (see, e.g., Sambrook et al., 1989, supra).

[0221] The host cell is transformed with at least one expression vector. When only a single expression vector is used (without the addition of an intermediate), the vector will contain all of the nucleic acid sequences necessary.

[0222] Once the host cell has been transformed with the expression vector, the host cell is allowed to grow. Growth of a host cell in a medium may involve the process of fermentation. Methods of the disclosure may include culturing the host cell such that recombinant nucleic acids in the cell are expressed. Media, temperature ranges and other conditions suitable for growth are known in the art.

[0223] According to some aspects of the disclosure, the culture media contains a carbon source for the host cell. Such a “carbon source” generally refers to a substrate or compound suitable to be used as a source of carbon for cell growth. Carbon sources can be in various forms, including, but not limited to polymers, carbohydrates, acids, alcohols, aldehydes, ketones, amino acids, peptides, etc. These include, for example, various monosaccharides, oligosaccharides, polysaccharides, a biomass polymer such as cellulose or hemicellulose, xylose, arabinose, disaccharides, such as sucrose, saturated or unsaturated fatty acids, succinate, lactate, acetate, ethanol, etc., or mixtures thereof.

[0224] In addition to an appropriate carbon source, media must contain suitable minerals, salts, cofactors, buffers and other components, known to those skilled in the art, suitable for the growth of the cultures and promotion of the enzymatic pathways necessary for the fermentation of various sugars and the production of hydrocarbons and hydrocarbon derivatives. Reactions may be performed under aerobic or anaerobic conditions where aerobic, anoxic, or anaerobic conditions are preferred based on the requirements of the microorganism. As the host cell grows and/or multiplies, expression of the enzymes, transporters, or other proteins necessary for growth on various sugars or biomass polymers, sugar fermentation, or synthesis of hydrocarbons or hydrocarbon derivatives is affected.

Cells with Reduced Expression of Clr-1, Clr-2, Or Clr-1 and Clr-2

[0225] The present disclosure also relates to cells that naturally produce clr-1 and clr-2 polypeptides and cellulase enzymes (“cellulolytic cells”), which have a reduced level of expression of clr-1, clr-2, or clr-1 and clr-2. Cells that naturally produce cellulase enzymes and that have a reduced level of expression of clr-1, clr-2, or clr-1 and clr-2 may have reduced levels of expression or secretion of one or more cellulases. Without being bound by theory, cells that naturally produce cellulase enzymes which have a reduced level of expression of clr-1, clr-2, or clr-1 and clr-2 may have reduced levels of expression or secretion of one or more cellulases due to reduced activity of clr-1, clr-2 or clr-1 and clr-2 as transcription factors promoting the transcription of cellulase genes. The level of expression of a gene may be assessed by measuring the level of mRNA encoded by the gene, and/or by measuring the level or activity of the polypeptide encoded by the gene.

[0226] Furthermore, provided herein are methods of preparing cells which have a reduced level of expression clr-1, clr-2, or both clr-1 and clr-2. Reduction in gene expression may be achieved by any number of techniques well known in the art, including without limitation, mutagenesis, RNAi, and antisense suppression.

[0227] Mutagenesis

[0228] Mutagenesis approaches may be used to disrupt or “knockout” the expression of a target gene. In some aspects, the mutagenesis results in a partial deletion of the target gene. In other aspects, the mutagenesis results in a complete deletion of the target gene. Methods of mutagenizing microorganisms, such as cellulolytic cells, are well known in the art and include, without limitation random mutagenesis and site-directed mutagenesis. Examples of methods of random mutagenesis include, without limitation, chemical mutagenesis (e.g., using ethane methyl sulfonate), insertional mutagenesis, and irradiation.

[0229] One method for reducing or inhibiting the expression of a target gene is by genetically modifying the target gene and introducing it into the genome of a cellulolytic cell to replace the wild-type version of the gene by homologous recombination (for example, as described in U.S. Pat. No. 6,924,146).

[0230] Another method for reducing or inhibiting the expression of a target gene is by insertion mutagenesis using the T-DNA of Agrobacterium tumefaciens, or transposons (see Winkler et al., Methods Mol. Biol. 82:129-136, 1989, and Martienssen Proc. Natl. Acad. Sci. 95:2021-2026, 1998). After generating the insertion mutants, the mutants can be screened to identify those containing the insertion in a target gene.

[0231] Other methods to disrupt a target gene include insertional mutagenesis (for example, as described in U.S. Pat. No. 5,792,633), and transposon mutagenesis (for example, as described in U.S. Pat. No. 6,207,384)

[0232] A further method to disrupt a target gene is by use of the cre-lox system (for example, as described in U.S. Pat. No. 4,959,317).

[0233] Another method to disrupt a target gene is by use of PCR mutagenesis (for example, as described in U.S. Pat. No. 7,501,275).

[0234] RNAi

[0235] Endogenous gene expression may also be reduced or inhibited by means of RNA interference (RNAi), which uses a double-stranded RNA having a sequence identical or similar to the sequence of the target gene. As used herein RNAi, includes the use of micro RNA, such as artificial miRNA to suppress expression of a gene.

[0236] RNAi is the phenomenon in which when a double-stranded RNA having a sequence identical or similar to that of the target gene is introduced into a cell, the expressions of both the inserted exogenous gene and target endogenous gene are suppressed. The double-stranded RNA may be formed from two separate complementary RNAs or may be a single RNA with internally complementary sequences that form a double-stranded RNA.

[0237] Thus, in some aspects, reduction or inhibition of gene expression is achieved using RNAi techniques. For example, to achieve reduction or inhibition of the expression of a DNA encoding a protein using RNAi, a double-stranded RNA having the sequence of a DNA encoding the protein, or a substantially similar sequence thereof (including those engineered not to translate the protein) or fragment thereof, is introduced into a cellulolytic cell of interest. As used herein, RNAi and dsRNA both refer to gene-specific silencing that is induced by the introduction of a double-stranded RNA molecule, see e.g., U.S. Pat. Nos. 6,506,559 and 6,573,099, and includes reference to a molecule that has a region that is double-stranded, e.g., a short hairpin RNA molecule. The resulting cellulolytic cells may then be screened for a phenotype associated with the reduced expression of the target gene, e.g., reduced cellulase expression, and/or by monitoring steady-state RNA levels for transcripts of the target gene. Although the sequences used for RNAi need not be completely identical to the target gene, they may be at least 70%, 80%, 90%, 91%, 92%, 93%, 94%, 95%, 96%, 97%, 98%, 99%, or more identical to the target gene sequence. See, e.g., U.S. Patent Application Publication No. 2004/0029283. The constructs encoding an RNA molecule with a stem-loop structure that is unrelated to the target gene and that is positioned distally to a sequence specific for the gene of interest may also be used to inhibit target gene expression. See, e.g., U.S. Patent Application Publication No. 2003/0221211.

[0238] The RNAi nucleic acids may encompass the full-length target RNA or may correspond to a fragment of the target RNA. In some cases, the fragment will have fewer than 100, 200, 300, 400, or 500 nucleotides corresponding to the target sequence. In addition, in some aspects, these fragments are at least, e.g., 50, 100, 150, 200, or more nucleotides in length. Interfering RNAs may be designed based on short duplexes (i.e., short regions of double-stranded sequences). Typically, the short duplex is at least about 15, 20, or 25-50 nucleotides in length (e.g., each complementary sequence of the double stranded RNA is 15-50 nucleotides in length), often about 20-30 nucleotides, e.g., 20, 21, 22, 23, 24, 25, 26, 27, 28, 29, or 30 nucleotides in length. In some cases, fragments for use in RNAi will correspond to regions of a target protein that do not occur in other proteins in the organism or that have little similarity to other transcripts in the organism, e.g., selected by comparison to sequences in analyzing publicly-available sequence databases. Similarly, RNAi fragments may be selected for similarity or identity with a conserved sequence of a gene family of interest, such as those described herein, so that the RNAi targets multiple different gene transcripts containing the conserved sequence.

[0239] RNAi may be introduced into a cellulolytic cell as part of a larger DNA construct. Often, such constructs allow stable expression of the RNAi in cells after introduction, e.g., by integration of the construct into the host genome. Thus, expression vectors that continually express RNAi in cells transfected with the vectors may be employed for this disclosure. For example, vectors that express small hairpin or stem-loop structure RNAs, or precursors to microRNA, which get processed in vivo into small RNAi molecules capable of carrying out gene-specific silencing (Brummelkamp et al, Science 296:550-553, (2002); and Paddison, et al., Genes & Dev. 16:948-958, (2002)) can be used. Post-transcriptional gene silencing by double-stranded RNA is discussed in further detail by Hammond et al., Nature Rev Gen 2: 110-119, (2001); Fire et al., Nature 391: 806-811, (1998); and Timmons and Fire, Nature 395: 854, (1998).

[0240] Methods for selection and design of sequences that generate RNAi are well known in the art (e.g. U.S. Pat. Nos. 6,506,559; 6,511,824; and 6,489,127).

[0241] In some aspects, RNAi sequences used herein correspond to a portion of SEQ ID NO: 2, SEQ ID NO: 119, SEQ ID NO: 183, SEQ ID NO: 5, or SEQ ID NO: 165. In some aspects, RNAi sequences used herein correspond to a portion of a nucleotide sequence having at least 10%, at least 15%, at least 20%, at least 25%, at least 30%, at least 35%, at least 40%, at least 45%, at least 50%, at least 55%, at least 60%, at least 65%, at least 70%, at least 75%, at least 80%, at least 85%, at least 90%, at least 95%, at least 98%, at least 99° %, or 100% identity to the sequence of SEQ ID NO: 2, SEQ ID NO: 119, SEQ ID NO: 183, SEQ ID NO: 5, or SEQ ID NO: 165. In some aspects, RNAi sequences used herein correspond to a portion of a nucleotide sequence having at least 10, at least 12, at least 14, at least 16, at least 18, at least 20, at least 22, at least 24, at least 26, at least 28, or at least 30 consecutive nucleotides of SEQ ID NO: 2, SEQ ID NO: 119, SEQ ID NO: 183, SEQ ID NO: 5, or SEQ ID NO: 165.

[0242] One of skill in the art will recognize that using technology based on specific nucleic acid sequences, families of homologous genes can be suppressed with a single transcript. For instance, if an antisense transcript is designed to have a sequence that is conserved among a family of genes, then multiple members of a gene family can be suppressed. Conversely, if the goal is to only suppress one member of a homologous gene family, then the transcript should be targeted to sequences with the most variation between family members.

[0243] The term “target gene” or “target sequences”, refers to a gene targeted for reduced expression.

[0244] Antisense and Ribozyme Suppression

[0245] A reduction or inhibition of gene expression in a cellulolytic cell of a target gene may also be obtained by introducing into cellulolytic cells antisense constructs based on a target gene nucleic acid sequence. For antisense suppression, a target sequence is arranged in reverse orientation relative to the promoter sequence in the expression vector. The introduced sequence need not be a full length cDNA or gene, and need not be identical to the target cDNA or a gene found in the cellulolytic cell to be transformed. Generally, however, where the introduced sequence is of shorter length, a higher degree of homology to the native target sequence is used to achieve effective antisense suppression. In some aspects, the introduced antisense sequence in the vector will be at least 30 nucleotides in length, and improved antisense suppression will typically be observed as the length of the antisense sequence increases. In some aspects, the length of the antisense sequence in the vector will be greater than 100 nucleotides. Transcription of an antisense construct as described results in the production of RNA molecules that are the reverse complement of mRNA molecules transcribed from an endogenous target gene. Suppression of a target gene expression can also be achieved using a ribozyme. The production and use of ribozymes are disclosed in U.S. Pat. Nos. 4,987,071 and 5,543,508.

[0246] Cellulolytic Cells Having Multiple Target Genes Inhibited

[0247] Expression of at least two target genes may be reduced or inhibited in a cellulolytic cell as described herein. In some aspects, both clr-1 and clr-2 genes are inhibited. In cells where expression of both clr-1 and clr-2 are reduced or inhibited, the same technique (e.g. RNAi, mutagenesis, etc.) may be used to reduce the expression of both clr-1 and clr-2, or different techniques may be used to reduce the expression of each of clr-1 and clr-2.

[0248] In further aspects at least one additional gene involved in regulating protein secretion, such as cellulase secretion, may be reduced or inhibited in a cellulolytic cell as described herein. In some embodiments, the catabolite repressor gene cre-1 is reduced or inhibited in the cellulolytic cell. In cells where expression of cre-I in combination with clr-1 and/or clr-2 is reduced or inhibited, the same technique (e.g., RNAi, mutagenesis, etc.) may be used to reduce expression of cre-1, and clr-1 and/or clr-2. Alternatively, different techniques may be used to reduce the expression of each of cre-1, and clr-1 and/or clr-2.

[0249] Expression of Target Gene Inhibitors

[0250] Expression cassettes containing nucleic acids that encode target gene expression inhibitors, e.g., an antisense or siRNA, can be constructed using methods well known in the art. Constructs include regulatory elements, including promoters and other sequences for expression and selection of cells that express the construct. Typically, fungal and/or bacterial transformation vectors include one or more cloned coding sequences (genomic or cDNA) under the transcriptional control of 5′ and 3′ regulatory sequences and a dominant selectable marker. Such transformation vectors typically also contain a promoter (e.g., a regulatory region controlling inducible or constitutive, environmentally- or developmentally-regulated expression), a transcription initiation start site, an RNA processing signal (such as intron splice sites), a transcription termination site, and/or a polyadenylation signal.

[0251] In certain aspects, a cell which has a reduced level of expression clr-1, clr-2, or both clr-1 and clr-2 is fungus of the Ascomycota phylum. In some aspects, the cell which has a reduced level of expression clr-1, clr-2, or both clr-1 and clr-2 is of the genus Metarhizium, Gibberella, Nectria, Magnaporthe, Neurospora, Sordaria, Chaetomium, Podospora, Verticillium, Glomerella, Grosmannia, Sclerotinia, Botryotinia, Aspergillus, Aspergillus, Penicillium, Leptosphaeria, Phaeosphaeria, Pyrenophora, Penicillium, Talaromyces, Trichoderma, Uncinocarpus, Coccidioidesi, Saccharomyces, Schizosaccharomyces, Sporotrichum (Myceliophthora), Thielevia, Acremonium, Yarrowia, Hansenula, Kluyveromyces, Pichia, Mycosphaerella, Neosartorya, Thermomyces (Humicola, Monotospora, Sepedonium), or Chrysosporium.

[0252] In some aspects, the cell which has a reduced level of expression clr-1, clr-2, or both clr-1 and clr-2 is of the species Neurospora crassa, Metarhizium anisopliae, Gibberella zeae, Nectria haematococca, Magnaporthe oryzae, Neurospora tetrasperma, Sordaria macrospora, Chaetomium globosum, Podospora anserina, Verticillium albo-atrum, Glomerella graminicola, Grosmannia clavigera, Sclerotinia sclerotiorum, Botryotinia fuckeliana, Aspergillus oryzae, Aspergillus nidulans, Aspergillus niger, Aspergillus fumigatus, Penicillium chrysogenum, Leptosphaeria maculans, Phaeosphaeria nodorum, Pyrenophora tritici-repentis, Pyrenophora teres, Penicillium marneffei, Talaromyces stipitatus, Trichoderma reesei, Uncinocarpus reesii, Coccidioides immitus, Coccidioides posadasii, Saccharomyces cerevisiae, Schizosaccharomyces pombe, Sporotrichum thermophile (Myceliophthora thermophila), Thielavia terrestris-thermophilic, Acremonium cellulolyticus, Yarrowia lipolytica, Hansenula polymorpha, Kluyveromyces lactis, Pichia pastoris, Mycosphaerella graminicola, Neosartorya fischeri, Thermomyces lanuginosus (Humicola brevis, Humicola brevispora, Humicola grisea, Humicola lanuginosa, Monotospora lanuginosa, Sepedonium lanuginosum), Talaromyces thermophilus (Talaromyces dupontii, Penicillium dupontii), or Chrysosporium lucknowense.

### Applications

[0253] Methods of Increasing Cell Growth

[0254] Provided herein are methods for increasing the growth rate of a cell having one or more genes encoding cellulases. In one aspect, a method for increasing the growth rate of a cell having one or more genes encoding cellulases includes increasing the expression of clr-1, clr-2, or clr-1 and clr-2 polypeptides in the cell. Cells having increased expression of clr-1, clr-2, or clr-1 and clr-2 polypeptides in the cell may have an increased growth rate as compared with a corresponding cell not having increased expression of clr-1, clr-2, or clr-1 and clr-2 polypeptides in the cell. Alternatively, the growth rate of a cell having one or more genes encoding cellulases may be increased by mis-expressing recombinant nucleic acids encoding clr-1, clr-2, or clr-1 and clr-2 polypeptides in the cell. To increase the growth rate of a cell having one or more genes encoding cellulases, a cell containing recombinant nucleic acid(s) encoding clr-1, clr-2, or clr-1 and clr-2 polypeptides is incubated in media under conditions sufficient to support the expression of clr-1, clr-2, or clr-1 and clr-2. In some aspects, to increase the growth rate of a cell having one or more genes encoding cellulases, a cell containing recombinant nucleic acid(s) encoding clr-1, clr-2, or clr-1 and clr-2 polypeptides is incubated in media containing cellulose under conditions sufficient to support the expression of clr-1, clr-2, or clr-1 and clr-2. In other aspects, expression of at least one gene involved in regulating protein secretion, such as cellulase secretion, is reduced or inhibited in the cell. In some embodiments, expression of the catabolite repressor gene cre-1 is reduced or inhibited in the cell.

[0255] Methods for increasing the growth rate of a cell disclosed herein apply to all host cells disclosed herein.

[0256] Methods of Degrading a Cellulose-Containing Material

[0257] Provided herein are methods for degrading a cellulose-containing material. In one aspect, a method for degrading a cellulose-containing material includes the steps of: A) contacting a cellulose-containing material with a fungal host cell having at least one recombinant nucleic acid encoding clr-1, clr-2, or clr-1 and clr-2 transcription factor proteins in media under conditions necessary to support the expression of the at least one recombinant nucleic acid; and B) incubating the fungal host cell and cellulose-containing material under conditions t sufficient for the fungal host cell to degrade the cellulose-containing material. In certain embodiments, the fungal host cell is incubated under conditions sufficient for the fungal host cell to express said clr-2 transcription factor protein.

[0258] In another aspect, a method for degrading cellulose-containing material includes the steps of: A) incubating a fungal host cell having at least one recombinant nucleic acid encoding clr-1, clr-2, or clr-1 and clr-2 transcription factor proteins in media under conditions necessary to support the expression of the at least one recombinant nucleic acid; B) collecting one or more cellulases from the media and/or cell; and C) incubating the one or more cellulases from the media and/or cell with a cellulose-containing material under conditions sufficient for the one or more cellulases to degrade the t cellulose-containing material. In certain embodiments, the fungal host cell is incubated under conditions sufficient for the fungal host cell to express said clr-2 transcription factor protein.

[0259] In some embodiments, the fungal host cell produces a greater amount of one or more cellulases than a corresponding fungal host cell lacking the at least one recombinant nucleic acid.

[0260] In some embodiments, the method further includes reducing or inhibiting expression of at least one gene involved in regulating protein secretion, such as cellulase secretion. In certain preferred embodiments, the method further includes reducing or inhibiting expression of the catabolite repressor gene cre-1 is reduced or inhibited in the cell.

[0261] As used herein, a “cellulose-containing material” is any material that contains cellulose, including biomass, such as biomass containing plant material. Biomass suitable for use with the currently disclosed methods include any cellulose-containing material, and includes, without limitation, Miscanthus, switchgrass, cord grass, rye grass, reed canary grass, elephant grass, common reed, wheat straw, barley straw, canola straw, oat straw, corn stover, soybean stover, oat hulls, sorghum, rice hulls, rye hulls, wheat hulls, sugarcane bagasse, copra meal, copra pellets, palm kernel meal, corn fiber, Distillers Dried Grains with Solubles (DDGS), Blue Stem, corncobs, pine wood, birch wood, willow wood, aspen wood, poplar wood, energy cane, waste paper, sawdust, forestry wastes, municipal solid waste, waste paper, crop residues, other grasses, and other woods.

[0262] As an initial processing step in the degradation of biomass, biomass may be subjected to one or more pre-processing steps. Pre-processing steps are known to those of skill in the art, and include physical and chemical processes. Pre-processing steps include, without limitation, ammonia fiber expansion (AFEX), steam explosion, treatment with high temperature, treatment with high pressure, treatment with alkaline aqueous solutions, treatment with acidic solutions, treatment with organic solvents, treatment with ionic liquids (IL), treatment with electrolyzed water, and treatment with phosphoric acid.

[0263] In further embodiments, the fungal host cell may also have one or more recombinant nucleic acids that encode a polypeptide involved in a biochemical pathway for the production of at least one biofuel. Accordingly, the fungal host cell may also be incubated with degraded cellulose-containing material under conditions sufficient for the fungal host cell to convert the cellulose-containing material to at least one biofuel. Alternatively, the degraded cellulose-containing material may be cultured with a fermentative microorganism under conditions sufficient to produce at least one fermentation product from the degraded cellulose-containing material. Suitable biofuels and/or fermentation products include, without limitation, ethanol, n-propanol, n-butanol, iso-butanol, 3-methyl-1-butanol, 2-methyl-1-butanol, 3-methyl-1-pentanol, and octanol.

[0264] Methods for Reduction of the Viscosity of Pretreated Biomass Mixtures

[0265] Also provided herein are methods for reducing the viscosity of pretreated biomass mixtures, prior to the degradation of the pretreated biomass mixtures into monosaccharides and oligosaccharides.

[0266] Biomass that is used for as a feedstock, for example, in biofuel production generally contains high levels of lignin, which can block hydrolysis of the cellulosic component of the biomass. Typically, biomass is subjected to a pretreatment step to increase the accessibility of the cellulosic component to hydrolysis. However, pretreatment generally results in a biomass mixture that is highly viscous. The high viscosity of the pretreated biomass mixture can also interfere with effective hydrolysis of the pretreated biomass. Advantageously, the cells of the present disclosure having an increased expression of clr-1, clr-2, or clr-1 and clr-2 of the present disclosure, or cellulases produced from the cells, can be used to reduce the viscosity of pretreated biomass mixtures prior to further degradation of the biomass.

[0267] Accordingly, certain aspects of the present disclosure relate to methods of reducing the viscosity of a pretreated biomass mixture, by contacting a pretreated biomass mixture having an initial viscosity with any of the cells having an increased expression of clr-1, clr-2, or clr-1 and clr-2 of the present disclosure, or with cellulases produced from the cells, and incubating the contacted biomass mixture under conditions sufficient to reduce the initial viscosity of the pretreated biomass mixture.

[0268] In some aspects, the disclosed methods are carried out as part of a pretreatment process. The pretreatment process may include the additional step of adding any of the cells having an increased expression of clr-1, clr-2, or clr-1 and clr-2, of the present disclosure, or cellulases produced from the cells, to pretreated biomass mixtures after a step of pretreating the biomass, and incubating the pretreated biomass with the cells having an increased expression of clr-1, clr-2, or clr-1 and clr-2, or cellulases produced from the cells, under conditions sufficient to reduce the viscosity of the mixture. The cells having an increased expression of clr-1, clr-2, or clr-1 and clr-2, or the cellulases produced from the cells may be added to the pretreated biomass mixture while the temperature of the mixture is high, or after the temperature of the mixture has decreased. In some aspects, the methods are carried out in the same vessel or container where the pretreatment was performed. In other aspects, the methods are carried out in a separate vessel or container where the pretreatment was performed.

[0269] In some aspects, the methods are carried out in the presence of high salt, such as solutions containing saturating concentrations of salts, solutions containing sodium chloride (NaCl) at a concentration of at least at or about 0.5 M, 1 M, 1.5 M, 2 M, 2.5 M, 3 M, 3.5 M, or 4 M sodium chloride, or potassium chloride (KCl), at a concentration at or about 0.5 M, 1 M, 1.5 M, 2 M, 2.5 M 3.0 M or 3.2 M KCl and/or ionic liquids, such as 1,3-dimethylimidazolium dimethyl phosphate ([DMIM]DMP) or [EMIM]OAc, or in the presence of one or more detergents, such as ionic detergents (e.g., SDS, CHAPS), sulfydryl reagents, such as in saturating ammonium sulfate or ammonium sulfate between at or about 0 and 1 M. In other aspects, the methods are carried out over a broad temperature range, such as between at or about 20° C. and 50° C., 25° C. and 55° C., 30° C. and 60° C., or 60° C. and 110° C. In some aspects, the methods may be performed over a broad pH range, for example, at a pH of between about 4.5 and 8.75, at a pH of greater than 7 or at a pH of 8.5, or at a pH of at least 5.0, 5.5, 6.0, 6.5, 7.0, 7.5, 83.0, or 8.5.

[0270] Methods of Converting Cellulose-Containing Materials to Fermentation Product

[0271] Further provided herein are methods for converting cellulose-containing materials to a fermentation production. In one aspect, a method for converting a cellulose-containing material into a fermentation product includes the steps of: A) contacting a cellulose-containing material with a cell having at least one recombinant nucleic acid encoding clr-1, clr-2, or clr-1 and clr-2 transcription factor proteins under conditions sufficient to support expression of the nucleic acids; B) incubating the cellulose-containing material with the cell expressing the at least one recombinant nucleic acid encoding cdr-1, clr-2, or clr-1 and clr-2 transcription factor proteins under conditions sufficient for the fungal host cell to degrade the cellulose-containing material, in order to obtain sugars; and C) culturing the sugars with a fermentative microorganism under conditions sufficient to produce a fermentation product.

[0272] In another aspect, a method for converting a cellulose-containing material into a fermentation product includes the steps of: A) incubating a cell having recombinant nucleic acids encoding clr-1, clr-2, or clr-1 and clr-2 polypeptides in media under conditions necessary to support the expression of the recombinant nucleic acids; B) collecting cellulases from the media and/or cell; C) incubating cellulases from the media and/or cell with a cellulose-containing material under conditions that support cellulose degradation, in order to obtain sugars; and D) culturing the sugars with a fermentative microorganism under conditions sufficient to produce a fermentation product.

[0273] In some embodiments, the method further includes reducing or inhibiting expression of at least one gene involved in regulating protein secretion, such as cellulase secretion. In certain preferred embodiments, the method further includes reducing or inhibiting expression of the catabolite repressor gene cre-1 is reduced or inhibited in the cell.

[0274] Sugars that may be obtained from the degradation of cellulose-containing materials include, without limitation, glucose, cellobiose, xylose, arabinose, galactose, glucuronic acid, and mannose.

[0275] Fermentation products that may be produced from sugars obtained from the degradation of cellulose-containing materials include, without limitation, ethanol, n-propanol, n-butanol, iso-butanol, 3-methyl-1-butanol, 2-methyl-1-butanol, 3-methyl-1-pentanol, and octanol.

[0276] Fermentative organisms include, without limitation, Saccharomyces spp.

[0277] Methods of Consolidated Bioprocessing

[0278] Further provided herein are methods for converting cellulose-containing materials to a fermentation production, by consolidated bioprocessing. Consolidated bioprocessing combines enzyme generation, biomass hydrolysis, and biofuel production into a single stage. In one aspect, a method for converting a cellulose-containing material into a fermentation product by consolidated bioprocessing includes the steps of: A) contacting a cellulose-containing material with a cell having at least one recombinant nucleic acids encoding clr-1, clr-2, or clr-1 and clr-2 transcription factor proteins and one or more recombinant nucleic acids encoding a polypeptide involved in a biochemical pathway for the production of a biofuel under conditions sufficient to support expression of the nucleic acids; B) incubating the cellulose-containing material with the cell expressing the recombinant nucleic acids encoding clr-1, clr-2, or clr-1 and clr-2 transcription factor proteins and one or more recombinant nucleic acids encoding a polypeptide involved in a biochemical pathway for the production of a biofuel under conditions sufficient for the cell to degrade the cellulose-containing material and ferment the degraded cellulose-containing material, thereby producing a fermentation product.

[0279] In another aspect, a method for converting a cellulose-containing material into a fermentation product by consolidated bioprocessing includes the steps of: A) contacting a cellulose-containing material with a non-naturally occurring fungal cell, where the cell naturally contains genes encoding clr-1 and clr-2 transcription factor proteins, and where the cell contains modifications causing reduced expression of one or both of the clr-1 and clr-2 proteins, as compared to the expression of the clr-1 and clr-2 proteins in a corresponding fungal cell lacking said modifications, under conditions sufficient to support expression of the nucleic acids; B) incubating the cellulose-containing material with the non-naturally occurring fungal cell, where the cell naturally contains genes encoding clr-1 and clr-2 proteins, and where the cell contains modifications causing reduced expression of one or both of the clr-1 and clr-2 proteins, as compared to the expression of the clr-1 and clr-2 proteins in a corresponding fungal cell lacking said modifications, under conditions that support cellulose degradation and fermentation, in order to produce a fermentation product. In some aspects, in methods of consolidated bioprocessing involving a non-naturally occurring fungal cell, where the cell naturally contains genes encoding clr-1 and clr-2 proteins, and where the cell contains modifications causing reduced expression of one or both of the clr-1 and clr-2 proteins, as compared to the expression of the clr-1 and clr-2 proteins in a corresponding fungal cell lacking said modifications, the non-naturally occurring fungal cell further contains one or more recombinant nucleic acids encoding a cellulase.

[0280] In some embodiments, the method further includes reducing or inhibiting expression of at least one gene involved in regulating protein secretion, such as cellulase secretion. In certain preferred embodiments, the method further includes reducing or inhibiting expression of the catabolite repressor gene cre-1 is reduced or inhibited in the cell.

[0281] Fermentation products that may be produced from sugars obtained from the degradation of cellulose-containing materials include, without limitation, ethanol, n-propanol, n-butanol, iso-butanol, 3-methyl-1-butanol, 2-methyl-1-butanol, 3-methyl-1-pentanol, and octanol.

[0282] Methods of Increasing the Production of Cellulases

[0283] Provided herein are methods for increasing the production of cellulases from a cell having genes encoding one or more cellulases. In one aspect, a method for increasing the production of cellulases from a cell having genes encoding one or more cellulases includes increasing the expression of clr-1, clr-2, or clr-1 and clr-2 transcription factor proteins in the cell. Cells having increased expression of clr-1, clr-2, or clr-1 and clr-2 transcription factor proteins in the cell may have an increased production of cellulases as compared with a corresponding cell not having increased expression of clr-1, clr-2, or clr-1 and clr-2 transcription factor proteins in the cell. To increase the production of cellulases from a cell having one or more genes encoding cellulases, a cell containing recombinant nucleic acid(s) encoding clr-1, clr-2, or clr-1 and clr-2 transcription factor proteins is incubated in media under conditions sufficient to support the expression of clr-1, clr-2, or clr-1 and clr-2. In some aspects, to increase the production of cellulases from a cell having one or more genes encoding cellulases, a cell containing recombinant nucleic acid(s) encoding clr-1, clr-2, or clr-1 and clr-2 transcription factor proteins is incubated in media containing cellulose under conditions sufficient to support the expression of clr-1, clr-2, or clr-1 and clr-2.

[0284] In other aspects, a method of increasing the production of one or more cellulases from a fungal cell includes providing a fungal host cell having at least one recombinant nucleic acid encoding clr-1, clr-2, or clr-1 and clr-2 transcription factor proteins; and culturing the host cell under conditions sufficient to support the expression of the at least one recombinant nucleic acid, where the fungal host cell produces a greater amount of the one or more cellulases than a corresponding host cell lacking the at least one recombinant nucleic acid.

[0285] In some embodiments, the method further includes reducing or inhibiting expression of at least one gene involved in regulating protein secretion, such as cellulase secretion. In certain preferred embodiments, the method further includes reducing or inhibiting expression of the catabolite repressor gene cre-1 is reduced or inhibited in the cell.

[0286] In other embodiments, the fungal host cell is cultured in the absence of cellulose.

[0287] Methods for increasing the growth rate of a cell disclosed herein apply to all host cells disclosed herein.

[0288] Methods of Producing Cellulases

[0289] Also provided herein are methods for producing cellulases from a cell having genes encoding one or more cellulases. In one aspect, a method for producing cellulases from a cell having genes encoding one or more cellulases includes the steps of: A) incubating a cell having at least one recombinant nucleic acid encoding clr-1, clr-2, or clr-1 and clr-2 transcription factor proteins in media under conditions necessary to support the expression of the recombinant nucleic acids, and B) collecting cellulases from the media and/or cell. In some aspects, the media used for incubating a cell contains cellulose. In some aspects, the media used for incubating a cell does not contain cellulose.

[0290] In some embodiments, the method further includes reducing or inhibiting expression of at least one gene involved in regulating protein secretion, such as cellulase secretion. In certain preferred embodiments, the method further includes reducing or inhibiting expression of the catabolite repressor gene cre-1 is reduced or inhibited in the cell.

[0291] Cellulases that may be produced by the methods provided herein include any enzyme having cellulose-degrading activity, including endocellulases, exocellulases, beta-glucosidases, oxidative cellulases, and cellulose phosphorylases.

[0292] Cellulases can be collected from the media and/or cell by any method for protein purification and/or concentration, which are well known in the art. Proteins may be purified, without limitation, by ammonium sulfate fractionation and liquid chromatography, including ion-exchange, affinity, size-exclusion, and hydrophobic interaction chromatography. Proteins may be concentrated, without limitation, by ammonium sulfate fractionation, liquid chromatography, including ion-exchange, affinity, and hydrophobic interaction chromatography, and centrifugal ultrafiltration. Cells may be disrupted to release cellular content by any method known in the art, including mechanical, chemical, or enzymatic disruption.

[0293] Methods for producing cellulases from a cell having genes encoding one or more cellulases disclosed herein apply to all host cells disclosed herein.

[0294] Methods of Producing Hemicellulases

[0295] Also provided herein are methods for producing hemicellulases from a cell having genes encoding one or more hemicellulases. In one aspect, a method for producing hemicellulases from a cell having genes encoding one or more hemicellulases includes the steps of: A) incubating a cell having at least one recombinant nucleic acid encoding clr-1, clr-2, or clr-1 and clr-2 transcription factor proteins in media under conditions necessary to support the expression of the recombinant nucleic acids, and B) collecting hemicellulases from the media and/or cell. In some aspects, the media used for incubating a cell contains hemicellulose. In some aspects, the media used for incubating a cell does not contain hemicellulose.

[0296] In some embodiments, the method further includes reducing or inhibiting expression of at least one gene involved in regulating protein secretion, such as hemicellulase secretion. In certain preferred embodiments, the method further includes reducing or inhibiting expression of the catabolite repressor gene cre-1 is reduced or inhibited in the cell.

[0297] Hemicellulases that may be produced by the methods provided herein include any enzyme having hemicellulose-degrading activity, including, without limitation, exoxylanases, endoxylanases, □-arabinofuranosidases, □-glucuronidases, □-xylosidases, and acetyl xylan esterases.

[0298] Hemicellulases can be collected from the media and/or cell by any method for protein purification and/or concentration, which are well known in the art. Proteins may be purified, without limitation, by ammonium sulfate fractionation and liquid chromatography, including ion-exchange, affinity, size-exclusion, and hydrophobic interaction chromatography. Proteins may be concentrated, without limitation, by ammonium sulfate fractionation, liquid chromatography, including ion-exchange, affinity, and hydrophobic interaction chromatography, and centrifugal ultrafiltration. Cells may be disrupted to release cellular content by any method known in the art, including mechanical, chemical, or enzymatic disruption.

[0299] Methods for producing hemicellulases from a cell having genes encoding one or more hemicellulases disclosed herein apply to all host cells disclosed herein.

[0300] Methods of Analyzing Cellular Response to Cellulose and/or Genes Involved in Cellulose Metabolism

[0301] In yet another aspect, provided herein are methods for analyzing a cellular response to cellulose. In one aspect, a method for analyzing a cellular response to cellulose involves the steps of: A) Obtaining a cell which naturally produces clr-1 and/or clr-2 that is modified to reduce expression of clr-1 and/or clr-2; B) contacting the cell which naturally produces clr-1 and/or clr-2 that is modified to reduce expression of clr-1 and/or clr-2 with a cellulose containing-material; and C) analyzing one or more components of the cell, such as a polypeptide or a nucleic acid, in response to the cellulose-containing material. In some aspects, a cell which naturally produces clr-1 and/or clr-2 that is modified to reduce expression of clr-1 and/or clr-2 further contains a recombinant nucleic acid, which encodes a polypeptide involved in cellulose metabolism. In some aspects, a polypeptide involved in cellulose metabolism is a cellulase. In some aspects, in a cell which naturally produces clr-1 and/or clr-2 that is modified to reduce expression of clr-1 and/or clr-2, and that contains a recombinant nucleic acid encoding a polypeptide involved in cellulose metabolism, the biological activity of the polypeptide involved in cellulose metabolism may be analyzed.

[0302] Cells may be modified to reduce the expression of clr-1 and/or clr-2 by any method disclosed herein for the reduction of expression of a gene

### EXAMPLES

[0303] The following Examples are merely illustrative and are not meant to limit any aspects of the present disclosure in any way.

### Example 1

### Induction of Cellulose Degrading Enzymes in Wild Type N. crassa

[0304] To better understand the processes by which filamentous fungi sense and respond to cellulose in their environment, next generation RNA sequencing techniques were used to profile genome-wide mRNA abundance in N. crassa. For these experiments, cultures grown for 16 hrs in sucrose minimal medium (SMM; in linear growth phase), and then shifted the culture from SMM to cellulose as a sole carbon source (CMM; cellulose minimal medium) were used; RNA samples were taken at 30 min, 1 hr, 2 hr and 4 hr following shift from SMM to CMM and compared to a culture shifted to SMM at identical time points. Typical patterns of expression for genes known to be associated with cellulose degradation are depicted in FIG. 1A. This subset of genes increases in expression level approximately an order of magnitude within 30 min after transfer. Transcript abundance remains constant for approximately 1 hour before increasing by several more orders of magnitude between 2 and 4 hrs post transfer.

[0305] A very large number of genes change in expression profile following shift from SMM to CMM. Functional category analyses (Ruepp A et al., Nucleic Acids Res, 32: 5539-5545 (2004)) of this gene set revealed a large number are associated with the environmental stress response (Tian et al., Microbiology, 157: 747-759 (2011). We therefore determined the transcriptional profile when 16 hr SMM-grown cultures were transferred to media with containing no carbon (NC) source. We observed that transcripts for a large number of genes (including many cellulases and hemicellulases) undergo the same initial increase in abundance (30 min-1 hr), but not the secondary increase (2-4 hrs). In cultures shifted to SMM, transcripts remain at or near their initial abundances, commonly increasing up to 2-fold by 4 hours, but remaining well below abundance levels seen in cellulose or no-carbon cultures. These results suggest that the first stage of transcript accumulation is a result of the lifting of carbon-catabolite repression and a general starvation response. The second stage is likely the result of a specific induction of transcription in response to the presence of cellulose. Results for several predicted cellulases and hemicellulases depicting these trends are shown in FIGS. 1B and 1C, respectively. The first stage of transcript accumulation is likely a result of the lifting of carbon-catabolite repression and a general starvation response. The second stage is likely the result of a specific induction of transcription in response to the presence of cellulose.

[0306] To identify genes regulated at the level of transcription by the presence of cellulose, transcript abundances between libraries from the three carbon source conditions (SMM, CMM and NC) at 1 hr (starvation response) and 4 hrs (cellulose-specific response) after transfer were compared. Results from CMM and SMM cultures were performed in biological triplicate for these analyses. Differentially expressed genes were identified as those that (a) showed statistically significant changes in abundance as estimated by the Cuffdiff software package with a 5% false discovery rate and (b) showed at least a two-fold change in abundance consistently across all replicates of each condition.

[0307] FIG. 2 illustrates the abundance changes observed among these conditions. As many as 45% of predicted transcripts in the N. crassa genome (nearly 4500 genes) have altered abundance in CMM or NC cultures as compared to SMM culture, representative of the broad physiological changes that occur rapidly on transfer to carbon-poor conditions (FIGS. 2A, 2B, 2D, and 2E). In contrast, at the one hour time point, a relatively small number of genes showed statistically differing transcript abundance in NC cultures compared to CMM cultures, with 410 genes showing differential expression, 276 of which are more highly expressed in the NC culture versus CMM (FIG. 2C). The majority (257) of these genes are more highly expressed in NC conditions than in SMM conditions and are therefore likely a general starvation response. Four hours after media transfer, a new collection of genes emerges in the far upper right of FIG. 2D (4 hr) versus FIG. 2A (1 hr) (CMM versus SMM) and especially in the upper portion of FIG. 2F (4 hr) versus FIG. 2C (1 hr) (CMM versus NC). These 552 differentially expressed genes depicted in FIG. 2F comprise the cellulose transcriptional response (genes that either increase in expression level or decrease in expression level). This group is more specific to cellulose induction rather than a general response to starvation. Of particular interest are the 321 genes showing elevated expression level on cellulose, with abundances up to 4,000 times that of the no-carbon cultures. This induced group of genes includes 16 of the 21 predicted cellulases and 12 of the 19 predicted hemicellulases from N. crassa genome. Also included are 30 less well-characterized enzymes with predicted carbohydrate hydrolase, esterase or lipase activity with probable secretion signal peptides and 4 enzymes with predicted activity on disaccharides and signal peptides, as well as 44 hypothetical proteins with predicted signal peptides (Tables 1A-1E; In Table 1A-1E, genes are indicated in the left side column; the listed genes are the same for each of Tables 1A-E. Tables 1A-1E contain different results relating to the same set of genes.). Cellulose also induces transcription of 21 genes with predicted roles in protein synthesis, modification and secretion as well as 8 predicted carbohydrate transporters, including recently characterized cellobiose transporters (Galazka et al., Science, 330: 84-86 (2010)). The resulting gene list includes approximately half of the genes identified in a similar study employing Bayesian analysis of microarray data (Tian et al., Proc Nat Acad Sci. USA, 106: 22157-22162, (2009)). Of those genes identified by Tian et al. that were not regulated by cellulose in our study, half were found to be differentially expressed under starvation and/or derepression conditions (FIG. 3).

### Example 2

### Essential Regulators for Cellulose Degradation

[0308] To identify transcription factors required for cellulose degradation, we screened the ˜200 N. crassa transcription factor deletion collection for mutants with deficient growth on cellulose. Two mutants were identified with severe growth defects on cellulose but normal growth on sucrose. The corresponding genes, NCU07705 and NCU08042, were provisionally named cdr-1 and cdr-2, respectively for cellulose degradation regulator 1 and 2. However, it was later found that the “cdr” prefix was previously used for genes involved in cadmium resistance in N. crassa. Accordingly, the genes NCU07705 and NCU08042 were renamed as clr-1 and clr-2, respectively for cellulose degradation regulator 1 and 2. It should be noted that while some of the accompanying figures may refer to cdr-1 and cdr-2, the descriptions of these figures in Examples 2-4 below refer to cdr-1 as clr-1, and refer to cdr-2 as clr-2.

[0309] Deletion mutants for clr-1 and clr-2 exhibit little to no growth on cellulose, PASC or CMC in either liquid or solid culture, but exhibit wild type growth on minimal medium containing xylan (XMM), a hemicellulose, as a sole carbon source (FIGS. 4A and 4B). Furthermore, when dr mutants are grown on SMM and subsequently transferred to CMM, they are deficient for cellulase and hemicellulase activity and secretion, as well as total protein secretion. However, when transferred to xylan and allowed to grow for 24 hr, they exhibit normal hemicellulase enzyme activity and protein secretion (FIGS. 4C-4F). These phenotypes were taken as evidence that clr-1 and clr-2 are essential transcription factors for the specific detection and metabolic response to the presence of cellulose.

[0310] clr-1 and clr-2 encode proteins that belong to the fungal specific zinc binuclear cluster superfamily. This large and diverse family of transcriptional regulators includes many previously described regulators of alternative carbon metabolism, including gal-4, ace-I, and xlnR (xyr-1) (Stricker et al., App. Micro Biotech., 78: 211-220 (2008)). Members of this family typically maintain two conserved domains, a zinc (2) cysteine (6) binuclear cluster coordinating DNA binding, and a conserved central domain roughly corresponding to what is known as the middle homology region (Campbell et al., Biochem. J., 414: 177-187 (2008)). As shown in FIG. 5A, clr-1 and clr-2 also contain the conserved zinc (2) cysteine (6) binuclear domain, as well as a conserved central PFAM04082 domain.

[0311] An examination of the expression patterns of clr-1 and clr-2 reveals potential differences in their regulation and mode of action. Both genes are essentially off under SMM conditions, however upon exposure to cellulose, clr-1 transcript levels increase within the first 30 minutes and then slowly increase throughout the 4 hr time point. Meanwhile, clr-2 expression levels remain low at 30 minutes, increases slightly by 1 hour, but doesn't dramatically increase until the 4 hr time point (FIG. 5C). Thus, clr-2 expression closely mimics the expression pattern of cellulolytic genes, and thus may undergo a similar de-repression stage.

[0312] clr-1 and clr-2 expression is also specific to cellulose. Exposure and growth in SMM, XMM and NC have little effect on clr-1 or clr-2 transcript levels when compared to cellulose (FIG. 5D). However, although abundance of clr-1 transcript under CMM conditions is relatively unaffected in the clr-2 deletion strain, the induction of clr-2 expression upon cellulose exposure is abolished in a clr-1 mutant. Thus, accumulation of clr-2 transcript requires both the expression of clr-1 and the presence of the cellulose signal.

[0313] To determine whether mis-expression of clr-1 could induce clr-2 expression in the absence of cellulose, clr-1 was tagged with GFP and placed under the constitutively expressed promoter ccg-1 (FIG. 5B). The ccg-I clr-1-gfp construct was able to complement for the clr-1 knockout and showed localization of CLR-1 to the nucleus (FIG. 5E). When grown on CMM, RT-qPCR analysis shows wild type induction of clr-2 and the major cellulase NCU07340 (cbh-1) in the ccg-1 clr-1-gfp strain (FIG. 5F). However, when the ccg-1 clr-1-gfp strain was grown in SMM, expression levels of cbh-1 and clr-2 remain the same as wild-type grown on in SMM (FIG. 5F). Thus, inappropriate expression of clr-1 in SMM is not sufficient to induce expression of clr-1 or the cellulolytic regulon. This result suggests that clr-1 is post-transcriptionally modified in order to induce clr-2 and cellulase expression.

### Example 3

### Phylogenetic Analysis

[0314] A phylogenetic analysis of clr-1 and clr-2 was conducted to gain insight on the evolutionary history of the two genes. Maximum likelihood phylogenetic trees of clr-1 and clr-2 homologs largely recapitulated previous fungal trees (FIG. 6). Trees created using Bayesian inference also shows congruent trees (FIG. 9). Similarities between the two trees lend support to the idea that CLR-1 and CLR-2 may be co-evolving and the hypothesis that they may act together as a heterocomplex.

### Example 4

### CLR-1 and CLR-2 Regulons

[0315] Strains containing deletions of clr-1 or clr-2 have similar global expression profiles to a wild type strain when transferred from SMM to NC. Importantly, predicted cellulase genes have FPKMs that are similar both in magnitude and relation to each other in wild type NC culture as compared to Δclr-1 or Δclr-2 CMM cultures (FIG. 7A). Thus wild type NC cultures and the Δclr-1 or Δclr-2 CMM culture appear to undergo an identical starvation response. When compared to wild type on CMM, it is clear that both Δclr-1 and Δclr-2 mutants failed to induce cellulase gene transcripts in response to exposure to cellulose and are therefore starving (FIG. 7A). Under CMM conditions, hemicellulase gene profiles were more mixed in the Δclr-1 or Δclr-2 mutants, with transcripts from some predicted hemicellulase genes showing wild type abundance in the Δclr-1 or Δclr-2 mutants, while others were dependent upon functional clr-1 and clr-2 for induction (FIG. 7B).

[0316] Global expression analyses in the Δclr-1 or Δclr-2 mutants transferred to CMM revealed that they show differential expression of a smaller number of cellulose-specific genes identified in a wild type transferred to CMM (cellulose regulon) (FIGS. 7C and 7D). These results indicate that the cellulose regulon includes genes regulated by clr-1 and/or clr-2 as well as some genes under the regulation of an independent mechanism. To delineate the respective regulons, all genes exhibiting differential expression in CMM versus NC conditions or in wild type versus the deletion mutants on CMM were hierarchically clustered by their FPKM values. The resulting clusters indicate that clr-1 and clr-2 share a common regulon that is a major subset of the cellulose induced genes (FIG. 7E). Of the 321 genes that increase in expression level identified in the wild type cellulose regulon (see above), clr-1 and clr-2 are essential for the induction of 204 genes. A further 59 genes required functional clr-1 and clr-2 for increased expression levels, in comparison to wild type. Importantly, the clr-1 and clr-2 regulons almost completely overlap each other (clr regulon). The clr regulon is highly enriched for genes encoding cellulases, polysaccharide active enzymes, transporters and protein synthesis and secretion components with respect to the total cellulose regulon (FIG. 7F). Some, but not all predicted hemicellulases are also under clr regulation. Predicted hemicellulases under clr regulation increase in to a higher expression level after transfer to CMM than transfer to XMM. This cellulase-like expression pattern may indicate that these genes actually encode cellulose active enzymes, or that is advantageous to maintain a group of true hemicellulases under tight co-regulation with cellulases. It should be noted that fungi never encounter pure cellulose without hemicellulose under natural settings.

### Example 5

### Dependence of Cellobiose Induction on CLR-1 and CLR-2

[0317] When fungal cellulases interact with cellulose, cellobiose and glucose are the main soluble products. Without wishing to be bound by theory, it is believed that cellobiose, or a product derived therefrom, is the inducing molecules for fungal cellulases. However, to be utilized, the cellobiose must be hydrolyzed to glucose by beta-glucosidase enzymes. In cultures with pure cellobiose, glucose concentrations quickly rise and cellulase induction is blocked through carbon catobolite repression. Moreover, glucose repression of cellulases is abolished in N. crassa strains in which the most highly expressed beta-glucosidase genes (NCU00130, NCU08755 and NCU04952) are deleted (Znameroski et al., Proc Natl Acad Sci USA. 2012 Apr. 17; 109(16):6012-7). This mutant system allows for very specific cellulase induction experiments free of any other signaling molecules that may contaminate Avicel® (crystalline cellulose ˜98-99% pure), which is purified from natural plant cell wall material (with ˜1-2% hemicellulose contamination).

[0318] We generated N. crassa mutant strains carrying deletions for the beta-glucosidase genes and for clr-1 or clr-2. When these ΔBG+Δclr mutants were switched from sucrose to cellobiose, the major cellulase cbh-1 was not induced (FIG. 10). These results strongly suggest that cellobiose, or a product derived therefrom, is the signal molecule that activates the clr-1/clr-2 pathway.

[0319] In contrast to cbh-1, the cellodextrin transporter cdt-2 is still strongly induced in the ΔBG Δclr-2 mutant. This difference in regulation of cellulase genes and cellobiose utilization genes by clr-1 and clr-2 is consistent with the disclosed model network in which clr-1 is intimately involved in cellobiose detection and utilization but clr-2 only regulates cellulase genes and their secretion (FIG. 8).

### Example 6

### Effect of Mis-Expression of CLR-1 on Cellulase Expression

[0320] Without wishing to be bound by theory, it is believed that clr-1 undergoes post-transcriptional modification or activation in the presence of cellobiose and the absence of repressing carbon sources. Consistent with this belief, it was shown that merely forcing transcription of clr-1 under non-inducing conditions did not result in cellulase production.

[0321] We generated a N. crassa strain with a GFP tagged copy of clr-1 under control of the ccg-1 promoter at the his-3 locus. The ccg-1 is responsive to the N. crassa circadian rhythm and nutrient conditions. For the purposes of these experiments, the ccg-1 promoter served as a constitutive promoter, driving greater clr-1 transcription that is normally seen under rich carbon (sucrose) or starvation conditions and lower clr-1 transcription under Avicel® conditions as seen from the native promoter.

[0322] Our clr-1 mis-expression strain produces no detectable cellulase activity in sucrose culture. Results from a CMCase enzyme activity experiment are show in FIG. 11A. The results show that the enzyme activity was lower in the mis-expression mutant than in the wild-type strain (FIG. 11A). The mis-expressed clr-1 in this strain was tagged with a C-terminal GFP marker that may reduce its transcriptional efficiently. However, this reduced activity is sufficient for growth on Avicel®.

[0323] Further, transcription of the major cellulase cbh-1 showed very poor correlation to clr-1 transcription in both wild type and mutant strains (FIG. 11B). Transcription of cbh-1 correlated with the presence or absence of a cellulase induction by Avicel®, but was not correlated with clr-1 expression levels.

### Example 7

### Effect of Mis-Expression of CLR-2 on Cellulase Expression and Activity Under Non-Inducing Conditions

[0324] We generated N. crassa strains expressing clr-2 under control of the ccg-1 promoter at the his-3 locus. Expression of clr-2 under non-inducing conditions was sufficient to induce cellulase gene expression and activity (FIG. 12A). Regardless of media condition, transcript abundance of cbh-1 was directly proportional to clr-2 transcript abundance (FIG. 12A). This proportionality was not dependent on either inducer or a functional copy of clr-1. However, cbh-1 induction was most efficient in the presence of both inducer and a functional copy of clr-1.

[0325] Transcriptional induction of cellulase genes by clr-2 mis-expression resulted in secretion of active cellulases (FIG. 12B). FIG. 12B shows the results of a CMCase enzyme activity experiment with wild-type (WT) and clr-2 mis-expression strains. The sucrose grown mis-expression strain quickly developed enzymatic activity comparable to that of Avicel® grown WT strains (FIG. 12B).

[0326] Consistent with observations that clr-2 transcript abundance and cbh-1 transcript abundance are correlated, mis-expression strains with higher expression levels of clr-2 secreted more protein with greater enzyme activity (FIGS. 12C and 12D). FIGS. 12C and 12D show CMCase enzyme activity and secreted protein from clr-2 mis-expression strains pre-grown in sucrose and shifted to either Avicel® or sucrose media. In the Δ/Pccg1-clr-2 strain, clr-2 is deleted from its native locus and expressed under control of the ccg-1 promoter at the his-3 locus. In the Native/Pccg1-clr-2 strain, the native copy of clr-2 is retained in addition to the ccg-1 driven copy of clr-2 at the his-3 locus.

[0327] Additionally, an SDS-PAGE gel of culture supernatants indicated that the clr-2 mis-expression strain secretes a similar spectrum of enzymes on sucrose as does the WT strain on Avicel® (FIG. 13A). RNAseq analyses of major cellulase transcripts after a media shift from sucrose to no carbon conditions confirmed that enzymes in the clr-2 mis-expression strain were induced to similar levels as in the WT shifted to Avicel® (FIG. 13B).

[0328] RNAseq results from the clr-2 mis-expression strain complimented results from a wild-type (WT) N. crassa strain in various media conditions. The dr deletion strains on Avicel® and the ΔBG mutants on cellobiose illustrate several modes of transcriptional induction of WT strains on Avicel®. FIG. 14 shows hierarchical clusters of the approximately 200 genes induced by Avicel® in these strains and conditions. Of these genes, approximately one quarter are not induced by cellobiose, but are induced by hemicellulosic contamination of Avicel®, including several hemicellulase and pentose sugar utilization genes (FIG. 14). Of the cellobiose induced genes, all showed some decrease in abundance in the Δclr-1 and Δclr-2 strains on Avicel® and approximately ⅔ were dependent on clr-1 and/or clr-2 (FIG. 14). These genes showed a no carbon-like expression profile in the clr-1 and clr-2 deletion strains on Avicel®. Most of the clr-dependent genes were strongly induced in the clr-2 mis-expression mutant (FIG. 14). One cluster of approximately 50 genes had complex expression patterns indicating some level of modulation of expression by clr-1 and/or clr-2. Among clr-modulated genes, most were more strongly affected in the Δclr-1 deletion strains and had little to no induction in the clr-2 deletion strain. Notable among clr-modulated genes most strongly affected by clr-1 are several genes involved in cellobiose utilization.

### Example 8

### Condition-Specific Post Translational Modification of CLR-1

[0329] Without wishing to be bound by theory, it is believed that one way that clr-1 may be activated in response to cellobiose and/or global metabolic state is through post-translational modification. Western blot analysis of V5-tagged clr-1 at its native locus indicated a small but detectable shift in the mature CLR-1 protein when cultures were shifted from sucrose to Avicel® or no carbon conditions (FIG. 15). As shown in FIG. 15, the CLR-1 protein, which is predicted to be 78 kDa, ran in two bands on the gel. The larger band was more abundant in culture shifted to sucrose, cellobiose, xylan and xylose; whereas the smaller band was more abundant in Avicel® and no carbon conditions (FIG. 15). These results suggest that CLR-1 undergoes modification or selective degradation under starvation conditions. Moreover, while clr-1 transcript abundance was much higher under Avicel® conditions than under sucrose conditions, there were comparable amounts of mature CLR-I protein under both of these conditions (FIG. 15). Without wishing to be bound by theory, it is believed that these results suggest that there is increased turnover under starvation conditions.

### Example 9

### Identification of Direct Targets of CLR-1 and CLR-2

[0330] To further characterize the CLR regulons and their DNA binding motifs, chromatin immunoprecipitation (ChIP) was conducted on epitope-tagged CLR-1 and CLR-2 proteins. The experimental setup was similar to the RNAseq media swaps, with N. crassa strains grown on minimal media with sucrose for 16 hours then switched to Avicel® for 24 hours. For these experiments, CLR-1 was GFP tagged and under the control of the ccg-1 promoter, and CLR-2 was mCherry tagged and also under the ccg-1 promoter. The subsequent libraries yielded approximately 417 target genes in the CLR-1 ChIPseq library and 318 genes in the CLR-2 library (FIG. 16A).

[0331] In order to determine whether CLR-1 and CLR-2 are able to directly control the expression of genes upregulated on cellulose, we compared their ChIP-Seq regulons to the wild-type RNA-Seq regulon containing the 212 genes upregulated on cellulose (FIG. 13B). CLR-1 and CLR-2 together or separately bound to the promoter regions of approximately half the genes induced on Avicel® (FIG. 16A). The CLR proteins did not bind the promoters of genes down-regulated (over 2-fold down) on Avicel® versus no-carbon. These results indicate that CLR-1 and CLR-2 function strictly as transcriptional activators.

[0332] Overall, the ChIP-Seq results (FIG. 16A) largely recapitulated the RNA-Seq results (FIG. 13B). The CLR-1 and CLR-2 proteins together bound 40 genes that included a core set of 10 of the most highly expressed cellulase genes along with 2 hemicellulase genes. Additional genes of note within the 40 gene set included xlr-1, a regulator of hemicellulase expression, vib-1 which is involved in secretion, and NCU03184 (flbC) which has reduced growth on Avicel® when deleted.

[0333] The large set of CLR-1-bound genes that that are not within the Avicel®/cellulose regulon have enriched functional gene categories that are predicted to be involved with interaction with the environment and signaling (287 gene set, FIG. 16A). These results are consistent with the belief that CLR-1 is specifically involved in sensing of cellobiose in the environment (FIG. 8). The gene set bound only by CLR-2 and not within the Avicel®/cellulose regulon was not enriched for any functional category (173 gene set; FIG. 16A).

[0334] The CLR-1 protein was also found to be bound at the promoters of both the clr-1 and clr-2 genes (FIG. 16B). CLR-1 binding can be seen throughout the clr-2 promoter region including through the annotated hypothetical gene NCU11779 (FIG. 16B). However, as NCU11779 is not expressed in the 200 plus RNA-Seq experiments under a wide variety of conditions, we do not believe that NCU11779 is a protein-encoding gene. These results suggest that CLR-1 binding at the clr-1 and clr-2 promoters provides a positive feedback loop for clr-1 expression and verifies clr-2 as a downstream target of CLR-I.

[0335] Although CLR-1 binds to a large number of cellulose responsive genes, it does not appear to bind to cellulose degrading enzymes by itself; as CLR-2 was always found bound in an adjacent region of these promoters. These results support the hypothesis that CLR-2 is the main activator of cellulases and can drive their expression alone when mis-expressed (FIG. 12). In addition, almost all promoter regions bound by both CLR-1 and CLR-2 overlapped with each other. This result supports the hypothesis that CLR-1 and CLR-2 interact physically at these promoters (FIG. 16C).

### Example 10

### Conservation of CLR Protein Sequences and Function in Filamentous Ascomycete Fungi

[0336] To assess whether clr-1 and clr-2 homologs function to regulate genes involved in plant cell-wall deconstruction in other filamentous ascomycete species, we generated clr-1 and clr-2 homolog deletion strains in the distantly related fungus Aspergillus nidulans in AN5808 (clrA) and AN3369 (clrB). Similar to N. crassa Δclr-1 and Δclr-2 mutants, the A. nidulans ΔclrA and ΔclrB deletion strains were deficient for cellulase and xylanase activity, as well as total protein secretion when pre-grown glucose cultures were transferred to Avicel® (FIG. 17). Enzyme activity was abolished in the ΔclrB mutant, but the ΔclrA mutant showed ˜50% of wild-type (WT) activity (FIGS. 17A and 17B). Both deletion mutants were deficient for growth on cellobiose, although ΔclrB was more strongly affected (FIG. 17C). Consistent with enzyme data, the induction pattern of major cellulase genes in the ΔclrB mutant was several thousand-fold less than WT (FIG. 17D). However, in the ΔclrA mutant the average induction was two- to four-fold less. On a per-gene basis, this decrease was not statistically significant (P<0.05) for three of four tested cellulases (P=0.049, 0.052, 0.105, and 0.121 for AN1273, AN7230, AN0494, and AN5175, respectively), but considering all of the genes together, the null hypothesis that ΔclrA has WT levels of cellulase gene expression was not supported. These results support the conclusion that clrA has a less important role in cellulase induction in A. nidulans compared with clr-1 in N. crassa. However, the function of CLR-2/ClrB as an essential activator for cellulase gene expression and activity is conserved between N. crassa and A. nidulans, two of the most widely divergent species of filamentous ascomycete fungi.

[0337] Results from RT-PCR analysis showed that the Avicel®-induced expression of clrA on Avicel® was dependent on the presence of clrB, but not vice versa (FIG. 17E). This result suggests that the growth defect of ΔclrB on cellobiose could be an additive effect of reduced expression of clrA and other genes.

### Example 11

### Mis-Expression of CLRA and CLRB in Aspergillus nidulans

[0338] Given the results showing the conservation between clrB and clr-2 as essential factors for cellulase gene expression in both N. crassa and A. nidulans (FIG. 17) and that mis-expression of clr-2 is sufficient to induce cellulase expression under non-inducing conditions in N. crassa (FIG. 12), we decided to test whether mis-expression of clrB in A. nidulans can induce cellulase expression. In a ΔclrB A. nidulans strain, the clrB gene was put under the control of gpdA promoter and integrated into the genome at the pyrG locus of the ΔclrB strain, with the A. fumigatus pyroA gene as a selective marker. FIG. 18A shows that the expression of clrB mRNA in the clrB mis-expression strain was much higher than in the wild-type strain in all conditions tested (glucose, no carbon and Avicel®). As shown in FIGS. 18B and 18C, the mis-expression of clrB restored expression of cbhD on Avicel® and the strain grew as well as wild-type on cellobiose. These results suggest that the mis-expressed ClrB protein is functional. Although the clrB mis-expression strain exhibited a higher CMCase activity than wild-type after growth on cellobiose for 48 hrs (FIG. 18C), no CMCase activity was detected in the clrB mis-expression strain grown on glucose. Moreover, the high mRNA level of clrB in the clrB mis-expression strain on Avicel® did not lead to higher mRNA level of cbhD at 6 hrs (FIGS. 18A and 18B).

### Example 12

### Expression of CLRA and CLRB in Neurospora crassa

[0339] Considering the relatively high amino acid sequence similarity of CLR proteins in A. nidulans and N. crassa (49% identity between clr-1 and clrA, and 32% identity between clr-2 and clrB), we tested whether clrA and clrB could substitute for their homologs in N. crassa. A N. crassa Δclr-1 strain expressing clrA under the ccg-1 promoter was generated. The Δclr-1 strain expressing clrA retained the severe growth defect on Avicel®, although it accumulated a similar amount of biomass as compared to wild-type on cellobiose (FIGS. 19A and 19B). A N. crassa Δclr-2 strain expressing clrB under the ccg-1 promoter was also generated. Although clrB is essential for growth on cellobiose and cellulase gene expression in A. nidulans, the mis-expressed clrB did not rescue the growth of N. crassa Δclr-2 on either Avicel® or cellobiose (FIGS. 19C and 19D). These results suggest that the function of clr-1/clrA in the cellobiose utilization pathway is conserved between A. nidulans and N. crassa, but the function of clr-1/clrA and clr-2/clrB in the regulation of Avicel®-specific response may be divergent.

### Example 13

### DNA-Binding Motifs of N. crassa CLR Proteins

### Clr-1

[0340] The top 50 CLR-1 chromatin-immunoprecipitation peaks, which were identified by sequence analysis (ChIP-Seq; promoter regions most frequently immunoprecipitated by antibody to epitope-tagged CLR-1), were searched for a characteristic DNA binding motif. The peaks were searched using the program MEME (Multiple Em for Motif Elicitation) and resulted in the motif depicted in FIG. 20A, for a consensus binding site for CLR-1 in promoters of target genes. This motif has the characteristic inverted CGG repeats that is commonly found in this class of transcription factors. One of the important characteristics of the CGG inverted repeat is the spacing between them, which helps determine which transcription factors can bind to the location. The CLR-1 motif is separated by a single non-conserved nucleotide. This spacing has been seen in other transcription factors, but none with a related function.

### Clr-2

[0341] The top CLR-2 chromatin-immunoprecipitation peaks, which were identified by sequence analysis (ChIP-Seq; promoter regions most frequently immunoprecipitated by antibody to epitope-tagged CLR-2), were searched for a characteristic DNA binding motif. The peaks were searched using the program MEME (Multiple Em for Motif Elicitation) and resulted in the motif depicted in FIG. 20B, for a consensus binding site for CLR-2 in promoters of target genes. This motif has the characteristic inverted CGG repeats that is commonly found in this class of transcription factors. One of the important characteristics of the CGG inverted repeat is the spacing between them, which helps determine which transcription factors can bind to the location. The CLR-2 motif is separated by 11 non-conserved nucleotides. This spacing is the same as for the Saccharomyces cerevisiae Gal4 motif, the closest yeast homolog to CLR-2. There are 50 motif binding sites within the CLR-2 ChIP regulon with the predicted DNA binding motif, this number was increased to 84 with the simplified version of CCG(N11)CGG.

### Example 14

### CLR Protein Sequence Analysis

[0342] Clr-1

[0343] The N. crassa clr-1 amino acid sequence was aligned with 22 other clr-1 homologs to identify conserved motif sequences (FIG. 21). Sequences were aligned with the MAFFT alignment algorithm (available from the CBRC mafft website). Alignments were manually inspected for regions of conservation outside of known conserved domains in likely orthologs (as determined by phylogenetic analysis), but which were not well conserved in the nearest non-clr-1 paralogs in N. crassa and A. nidulans. The consensus sequence was determined with the Jalview software suite.

[0344] As shown in FIG. 21, the sequence alignment identified the zinc(2)-cysteine(6) binuclear cluster domain, which is conserved in members of the fungal specific zinc binuclear cluster superfamily, at amino acids 220-275 of the consensus sequence shown at the bottom of the figure. The conserved zinc(2)-cysteine(6) binuclear cluster domain had the following sequence: C-E-V-C-R-S-R-K-S-R-C-D-G-T-K-P-K-C-K-L-C-T-E-L-G-A-E-C-I-Y-R-E (SEQ ID NO: 235).

[0345] The sequence alignment also identified the fungal-specific transcription factor PFAM04082 conserved central domain at amino acids 435-760 of the consensus sequence (FIG. 21). The PFAM04082 transcription factor domain had the following sequence: I-E-A-Y-F-E-R-V-N-V-W-Y-A-C-V-N-P-Y-T-W-R-S-H-Y-R-T-A-L-S-N-G-F-R-E-G-P-E-S-C-I-V-L-L-V-L-A-L-G-Q-A-S-L-R-G-S-I-S-R-I-V-P-X-E-D-P-P-G-L-Q-Y-F-T-A-A-W-X-L-L-P-G-M-M-T-X-N-S-V-L-A-A-Q-C-H-L-L-A-A-A-Y-L-F-Y-L-V-R-P-L-E-A-W-N-L-L-C-T-T-S-T-K-L-Q-L-L-L-M-A-P-N-R-V-P-P-X-Q-R-E-L-S-E-R-I-Y-W-N-A-L-L-F-E-S-D-L-L-A-E-L-D-L-P-H-S-G-1-V-Q-F-E-E-N-V-G-L-P-G-G-F-E-G-E-E-D-E-X-D-E-E-A-D-X-D-Q-E-I-A-X-V-T-A-V-G-R-D-E-L-W-Y-F-L-A-E-I-A-L-R-R-L-L-N-R-V-S-Q-L-I-Y-S-K-D-T-P-Y-S-K-G-P-S-M-A-S-T-T-S-L-E-P-I-V-A-E-L-D-F-Q-L-T-Q-W-Y-E (SEQ ID NO: 237), where X can be any amino acid residue.

[0346] Additionally, the sequence alignment identified five conserved sequence motifs that can be used to identify clr-1 transcription factors (FIG. 21). The first conserved motif was identified at amino acids 258-274 of the consensus sequence and has the following sequence: A-G-D-[KR]-[LM]-I-[LI]-[ED]-[RKQH]-L-N-R-I-E-[SNG]-L-L (SEQ ID NO: 188). The second conserved motif was identified at amino acids 851-867 of the consensus sequence and has the following sequence: H-[HR]-[ADE]-G-H-[MLI]-P-Y-[IL]-[WF]-Q-G-A-L-S-[MI]-[VMI](SEQ ID: 189). The third conserved motif was identified at amino acids 166-180 of the consensus sequence and has the following sequence: [NP]-[PS]-[LKTS]-K-[RK]-[RK]-[NSP]-[TSN]-[EDST]-X-X-[VIAT]-[DE]-Y-P (SEQ ID NO: 190), where X can be any amino acid residue. The fourth conserved motif was identified at amino acids 330-340 of the consensus sequence and has the following sequence: G-G-[FLIS]-G-[TSG]-[WAH]-X-W-P-[PA]-[TS] (SEQ ID NO: 191). The fifth conserved motif was identified at amino acids 104-111 of the consensus sequence and has the following sequence: R-[NH]-[LM]-[ST]-[QP]-[STP]-[SP]-[DE] (SEQ ID NO: 192).

### Clr-2

[0347] The N. crassa clr-2 amino acid sequence was aligned with 21 other clr-2 homologs to identify conserved motif sequences (FIG. 22). Sequences were aligned with the MAFFT alignment algorithm (available from the CBRC mafft website). Alignments were manually inspected for regions of conservation outside of known conserved domains in likely orthologs (as determined by phylogenetic analysis), but which were not well conserved in the nearest non-clr-1 paralogs in N. crassa and A. nidulans. The consensus sequence was determined with the Jalview software suite.

[0348] As shown in FIG. 22, the sequence alignment identified the zinc(2)-cysteine(6) binuclear cluster domain, which is conserved in members of the fungal specific zinc binuclear cluster superfamily, at amino acids 65-110 of the consensus sequence shown at the bottom of the figure. The conserved zinc(2)-cysteine(6) binuclear cluster domain had the following sequence: C-A-E-C-R-R-R-K-I-R-C-D-G-E-Q-PC-G-Q-C-X-W-Y-X-K-P-K-R-C-F-Y-R-V-X-P-S-R-K (SEQ ID NO: 236), where X can be any amino acid residue.

[0349] The sequence alignment also identified the fungal-specific transcription factor PFAM04082 conserved central domain at amino acids 368-555 of the consensus sequence (FIG. 22). The PFAM04082 transcription factor domain had the following sequence: I-D-A-Y-F-K-R-V-H-X-F-X-P-M-L-D-E-X-T-F-R-A-T-Y-L-E-G-Q-R-K-D-A-P-W-L-A-L-L-N-M-V-F-A-L-G-S-I-A-A-M-K-S-D-D-Y-N-H-X-X-Y-Y-N-R-A-M-E-H-L-X-L-D-S-F-G-S-S-H-X-E-T-V-Q-A-L-A-L-M-G-G-Y-Y-L-H-Y-I-N-R-P-N-X-A-N-A-L-M-G-A-A-L-R-M-A-S-A-L-G-L-H-R-E-S-L-A-Q-X-X-A-S-S-Q-K-G-V-N-X-S-D-X-A-S-A-E-T-R-R-R-T-W-W-S-L-F-C-L-D-T-W-A-T-T-T-L-G-R-P-S-X-G-R-W-G (SEQ ID NO: 238), where X can be any amino acid residue.

[0350] Additionally, the sequence alignment identified four conserved sequence motifs that can be used to identify clr-2 transcription factors (FIG. 22). The first conserved motif was identified at amino acids 140-152 of the consensus sequence and has the following sequence: [VL]-[ED]-[KAE]-L-S-[QTSN]-[STN]-[LVI]-[DE]-[DE]-[YC]-[RK]-[STV] (SEQ ID NO: 184). The second conserved motif was identified at amino acids 800-818 of the consensus sequence and has the following sequence: [MLI]-[STI]-G-W-N-A-V-W-[FLW]-[IVLCT]-[FY]-Q-[AS]-X-[ML]-[VI]-P-L-[ILV] (SEQ ID: 185), where X can be any amino acid residue. The third conserved motif was identified at amino acids 614-619 of the consensus sequence and has the following sequence: [ED]-X-L-[AV]-[AVI]-[STAL] (SEQ ID NO: 186), where X can be any amino acid residue. The fourth conserved motif was identified at amino acids 14-19 of the consensus sequence and has the following sequence: M-[FY]-[HIL]-T-F-[QE] (SEQ ID NO: 187).

### Materials & Methods for Examples 1-14 Include

[0351] Strains

[0352] The wild-type reference strain and background for all N. crassa mutant strains was FGSC 2489 (Neurospora crassa 74-OR23-1V A). Deletion strains for clr-1 and clr-2 with their open reading frames replaced by a hygromycin resistance cassette (FGSC 11029 and FGSC 15835 respectively) were obtained from the Fungal Genetics Stock Center at the University of Missouri, Kansas City, Mo. The wild-type A. nidulans reference strain was FGSC 4A. Gene deletions in A. nidulans were carried out by transforming FGSC A1149 (pyrG89; pyroA4; nkuA::argB) with knockout cassettes obtained from the Fungal Genetics Stock Center at the University of Missouri, Kansas City, Mo.

[0353] Transformants were crossed to LO1496 (fwA1, pyrG89, nicA2, pabaA1, from Berl R. Oakley Department of Molecular Biosciences, University of Kansas, Lawrence, Kans.) to remove nkuA::argB and pyroA4.

[0354] Culture Conditions for Media Shift Assay

[0355] N. crassa strains were inoculated into 3 mL agar slants with Vogel's minimal media (2% sucrose as carbon source; SMM) and grown at 30° C. in the dark for 48 hours, then at 25° C. in constant light for 4-10 days to stimulate conidia production. Suspended conidia were then inoculated into 100 mL of Vogel's minimal media at 106 conidia/mL and grown 16 hours at 25° C. in constant light and agitation. The mycelial cultures were then centrifuged at 3400 rpm for 10 min at room temperature and washed with Vogel's minimal media (VMM) without a carbon source. Washed mycelia were re-suspended in 100 mL Vogel's with 2% carbon source (cellulose or hemicellulose). The cellulose used in all experiments was Avicel® PH-101 (Sigma Aldrich, Mo.). The model hemicellulose used was Beechwood Xylan (Sigma Aldrich, Mo.).

[0356] A. nidulans cultures were grown on minimal media (MM). Carbon sources were 1% wt/vol unless otherwise noted. Conidia were inoculated into 100 mL liquid media at 4×106 conidia/mL and grown at 37° C. in constant light and shaking (200 rpm). A. nidulans cultures were grown 16-17 hr on MM-glucose. A 15 mL sample was taken at time 0. The remaining culture was filtered through miracloth, washed, and transferred to 100 mL MM containing 1% Avicel®. RNA was extracted as above and mRNA abundance was compared between the 8 hr and time 0 samples by quantitative RT-PCR. Fold-induction was calculated as the ratio of the mRNA level normalized to act A at 8 h vs. act A at time 0. For enzyme activity assays, culture supernatants were sampled at 48-120 hr, centrifuged at 2,390×g twice to remove mycelia and stored at 4° C. for analysis.

[0357] For RNA expression profiling, cultures were sampled post-transfer at 30 minutes, 1 hr, 2 hrs and 4 hrs. Mycelia samples were collected by filtering onto WHATMAN™ paper and were immediately flash-frozen in liquid nitrogen. Total RNA was extracted as described in (Kasuga et al., Nucleic Acids Res., 33: 6469-6485 (2005)).

[0358] For enzyme activity assays, culture supernatants were sampled at 24 hours, filtered with WHATMAN™ paper and stored at 4° C. for analysis within 72 hrs.

[0359] RNA Sequencing

[0360] RNA samples were reverse transcribed and prepared for high throughput sequencing with protocols adapted from Illumina Inc. Briefly, mRNA was purified with DYNABEADS™ Oligo dT magnetic beads (Illumina). Purified mRNA was fragmented with buffered zinc solution from Ambion (Cat #AM8740). First and second strand cDNA synthesis was carried out using Superscript II Reverse Transcriptase (Invitrogen) and DNA pol I (Invitrogen) and random primers. Illumina sequencing adapters were then ligated to the cDNA, 200 bp fragments were purified by gel electrophoresis, and PCR enriched with Pfx DNA polymerase (Invitrogen). Libraries were sequenced on the HiSeq 2000 DNA sequencing platform at the Vincent J. Coates Genomics Sequencing Laboratory at the California Institute for Quantitative Biosciences, Berkeley Calif. Approximately 60 million single end 50 base-pair reads were obtained per library.

[0361] Analysis of Differential Expression

[0362] To establish biological variation, triplicate cultures were sampled and analyzed for the wild type strain on cellulose and sucrose at 1 hour and 4 hours after the media shift. For all other strains and conditions, a single RNAseq library was analyzed.

[0363] Sequenced libraries were mapped against predicted transcripts from the N. crassa OR74A genome (version 10) with Bowtie (Langmead et al., (2009) Genome Biol 10:R25). Transcript abundance was estimated with Cufflinks using upper quartile normalization and mapping against reference isoforms from the Broad Institute. Genes exhibiting statistically significant expression changes between strains or growth conditions were identified with Cuffdiff, using upper quartile normalization and a minimum raw count of 5 reads (Roberts A, Trapnell et al., (2011) Genome Biology. 12:R22). The genes identified by Cuffdiffwere then filtered to select only those exhibiting a two-fold change in estimated abundance between all biological replicates of each strain/condition tested and only those genes with an FPKM consistently above 5 in at least one strain/condition were considered significant.

[0364] To compare genes exhibiting altered expression in clr mutants to those exhibiting altered expression in response to cellulose, genes were hierarchically clustered by their FPKMs in the wild type strain on cellulose, wild type on no-carbon and in the Δclr-1 and Δclr-2 strains on cellulose, all at 4 hours after media shift. Prior to clustering, FPMKs were log transformed, normalized across strains/conditions on a per-gene basis and centered on the median value across strains/conditions.

[0365] Enzyme Activity Assays

[0366] To assess total cellulase activity, 500 μL of culture supernatant was incubated with 2.5 mg cellulose in 500 μL of 100 mM sodium acetate, pH 5 for 5 hours at 37° C. 40 μL of incubated sample was then added to 160 μL assays solution containing dianisidine, peroxidase and glucose oxidase. In this assay, hydrogen peroxide released by glucose oxidation then oxidizes the dianisidine resulting in a color change proportional to glucose concentration. Absorbance of the glucose assays were read at 540 nm in a VERSAmax microplate reader (Molecular Devices). The background was subtracted with a no-cellulose control reaction and compared to that of glucose standards.

[0367] To assess hemicellulase activity, 100 μL of culture supernatant was incubated with 9 mg xylan in 900 μL of 100 mM sodium acetate, pH 5 for 30 minutes at 50° C. Released xylose was then measured by reduction of 3,5-dinitrosalicylic acid in a similar manner as the glucose oxidase assay.

[0368] Total protein was determined with the Bradford assay (BioRad).

[0369] Phylogenetic Analysis

[0370] Putative homologues to CLR-1 and CLR-2 were first identified through BLASTs to the NCBI protein database. The top hits from each BLAST were selected and were separately blasted to the Neurospora crassa protein database to verify CLR-1 or CLR-2 as the top hit and no other closely related Neurospora proteins. The phylogenetic trees were created using the maximum likelihood program PhyML with ALRT branch support. The CLR-2 tree has a log lk of −28588 and the CLR-1 tree has a log lk of −19403 (Anisimova M and Gascuel O, Systematic Biology, 55(4), 539-552 (2006)).

[0371] The phylogenetic trees were also run using Bayesian inference (MrBayes). (Huelsenbeck et al., (2001) Science 294: 2310-2314). One million generations were run with 8 chains, trees were sampled every 100 generations, with a burn-in of 2,500. The CLR-1 tree converged to 0.0056 and the CLR-2 tree converged to 0.0027. The resulting trees showed congruency with those generated with maximum likelihood (FIG. 9—phylogenetic trees based on Bayesian inference. They are identical to the maximum likelihood trees.)

[0372] RT-qPCR

| Primers: | |
|---|---|
| (SEQ ID NO: 7) | |
| clr-1-F | 5′-ATGACGCCGAACCGAGTG-3′ |
| (SEQ ID NO: 8) | |
| clr-1-R | 5′-CAACAACACCAGAATGCGG-3′ |
| (SEQ ID NO: 9) | |
| clr-2-F | 5′-TCCCGGCCATCAGACAGA-3′ |
| (SEQ ID NO: 10) | |
| clr-2-R | 5′-ATCGGCACGGAAGGTTGTT-3′ |
| (SEQ ID NO: 11) | |
| B-actin-F | 5′-TGATCTTACCGACTACCT-3′ |
| (SEQ ID NO: 12) | |
| B-actin-R | 5′-CAGAGCTTCTCCTTGATG-3′ |
| (SEQ ID NO: 13) | |
| cbh1-F | 5′-ATCTGGGAAGCGAACAAAG-3′ |
| (SEQ ID NO: 14) | |
| cbh1-R | 5′-TAGCGGTCGTCGGAATAG-3′ |

[0373] Primer efficiencies were tested on a gDNA dilutions series to determine if they were comparable to each other. The 2489 wild type strain and the ccg-1::clr-1-GFP were grown on Vogels media with sucrose for 16 hours. The cultures were rinsed as described above and transferred to fresh media containing either Avicel® or sucrose as the carbon source. RNA was extracted four hours post transfer. RT qPCR was carried out using the One Step Green ER kit (Invitrogen). One nanogram of total RNA was used in each RT-qPCR reaction and amplification conditions used were as described in the manufacturer's manual. Three technical triplicates were run for each sample. For the analysis, reactions were averaged and normalized to B-actin expression using the delta-delta Ct method (Livak K J and Schmittgen T D, Methods, 25: 402 (2001)).

### Tables

TABLE 1A
Genes under regulation by cellulose in wild type N. crassa
clustered by level of induction/repression in clr mutants

| Gene | Annotation | Group 1 | Group 2 | Cluster |
|---|---|---|---|---|
| NCU00554 | aspartate-semialdehyde | Amino Acid | | No |
| | dehydrogenase | Metabolism | | Induction |
| NCU00944 | l-allo-threonine aldolase | Amino Acid | | No |
| | | Metabolism | | Induction |
| NCU01195 | Glu/Leu/Phe/Val dehydrogenase | Amino Acid | | No |
| | | Metabolism | | Induction |
| NCU02785 | phospho-2-dehydro-3- | Amino Acid | | No |
| | deoxyheptonate aldolase | Metabolism | | Induction |
| NCU02954 | homoisocitrate dehydrogenase | Amino Acid | | No |
| | | Metabolism | | Induction |
| NCU03131 | FAD dependent oxidoreductase | Amino Acid | | No |
| | superfamily | Metabolism | | Induction |
| NCU04216 | amidophosphoribosyltransferase | Amino Acid | | No |
| | | Metabolism | | Induction |
| NCU04298 | pentafunctional AROM polypeptide | Amino Acid | | No |
| | | Metabolism | | Induction |
| NCU04837 | mitochondrial 2-oxodicarboxylate | Amino Acid | | No |
| | carrier 1 | Metabolism | | Induction |
| NCU05548 | phospho-2-dehydro-3- | Amino Acid | | No |
| | deoxyheptonate aldolase | Metabolism | | Induction |
| NCU07413 | cytosine deaminase, variant | Amino Acid | | No |
| | | Metabolism | | Induction |
| NCU10283 | tryptophan synthetase | Amino Acid | | No |
| | | Metabolism | | Induction |
| NCU00461 | NAD-specific glutamate | Amino Acid | | No |
| | dehydrogenase | Metabolism | | Repression |
| NCU00591 | methylcrotonoyl-CoA carboxylase | Amino Acid | | No |
| | subunit alpha | Metabolism | | Repression |
| NCU00680 | 2-methylcitrate dehydratase | Amino Acid | | No |
| | | Metabolism | | Repression |
| NCU01402 | indoleamine 2,3-dioxygenase | Amino Acid | | No |
| | | Metabolism | | Repression |
| NCU02127 | methylcrotonoyl-CoA carboxylase | Amino Acid | | No |
| | subunit beta | Metabolism | | Repression |
| NCU02704 | branched-chain alpha-keto acid | Amino Acid | | No |
| | dehydrogenase E2 | Metabolism | | Repression |
| NCU02727 | glycine cleavage system T protein | Amino Acid | | No |
| | | Metabolism | | Repression |
| NCU02936 | proline oxidase | Amino Acid | | No |
| | | Metabolism | | Repression |
| NCU03076 | delta-1-pyrroline-5-carboxylate | Amino Acid | | No |
| | dehydrogenase | Metabolism | | Repression |
| NCU03415 | aldehyde dehydrogenase | Amino Acid | | No |
| | | Metabolism | | Repression |
| NCU03648 | glutaminase A | Amino Acid | | No |
| | | Metabolism | | Repression |
| NCU03913 | 2-oxoisovalerate dehydrogenase | Amino Acid | | No |
| | beta subunit | Metabolism | | Repression |
| NCU05499 | homogentisate 1,2-dioxygenase | Amino Acid | | No |
| | | Metabolism | | Repression |
| NCU05537 | fumarylacetoacetase | Amino Acid | | No |
| | | Metabolism | | Repression |
| NCU05977 | dihydrodipicolinate synthase | Amino Acid | | No |
| | | Metabolism | | Repression |
| NCU06448 | enoyl-CoA hydratase | Amino Acid | | No |
| | | Metabolism | | Repression |
| NCU06543 | acyl-CoA dehydrogenase | Amino Acid | | No |
| | | Metabolism | | Repression |
| NCU07153 | glutamate carboxypeptidase | Amino Acid | | No |
| | | Metabolism | | Repression |
| NCU08216 | cystathionine beta-synthase | Amino Acid | | No |
| | | Metabolism | | Repression |
| NCU09116 | aromatic aminotransferase Aro8 | Amino Acid | | No |
| | | Metabolism | | Repression |
| NCU09266 | methylmalonate-semialdehyde | Amino Acid | | No |
| | dehydrogenase | Metabolism | | Repression |
| NCU09864 | 2-oxoisovalerate dehydrogenase | Amino Acid | | No |
| | alpha subunit | Metabolism | | Repression |
| NCU11195 | D-isomer specific 2-hydroxyacid | Amino Acid | | No |
| | dehydrogenase | Metabolism | | Repression |
| NCU01830 | 4-hydroxyphenylpyruvate | Amino Acid | | No |
| | dioxygenase | Metabolism | | Repression |
| NCU02126 | isovaleryl-CoA dehydrogenase | Amino Acid | | No |
| | | Metabolism | | Repression |
| NCU01744 | glutamate synthase | Amino Acid | | Partial |
| | | Metabolism | | Induction |
| NCU03748 | saccharopine dehydrogenase | Amino Acid | | Partial |
| | | Metabolism | | Induction |
| NCU06625 | cysteine dioxygenase | Amino Acid | | Partial |
| | | Metabolism | | Repression |
| NCU04130 | acylase ACY 1 | Amino Acid | | WT |
| | | Metabolism | | Induction |
| NCU10110 | 3-hydroxyisobutyrate | Amino Acid | | WT |
| | dehydrogenase | Metabolism | | Induction |
| NCU03861 | glutaminase A | Amino Acid | | WT |
| | | Metabolism | | Repression |
| NCU07623 | 2,2-dialkylglycine decarboxylase | Amino Acid | | WT |
| | | Metabolism | | Repression |
| NCU01427 | geranylgeranyl pyrophosphate | Anabolism | Carotenoid | WT |
| | synthetase | | Synthesis | Repression |
| NCU03651 | NADP-dependent malic enzyme | Anabolism | Fatty Acid | No |
| | | | Synthesis | Induction |
| NCU02579 | FAS1 domain-containing protein | Anabolism | Fatty Acid | No |
| | | | Synthesis | Repression |
| NCU07307 | fatty acid synthase beta subunit | Anabolism | Fatty Acid | Partial |
| | dehydratase | | Synthesis | Repression |
| NCU07308 | fatty acid synthase alpha subunit | Anabolism | Fatty Acid | Partial |
| | reductase | | Synthesis | Repression |
| NCU05858 | fatty acid oxygenase | Anabolism | Fatty Acid | WT |
| | | | Synthesis | Repression |
| NCU01013 | delta-aminolevulinic acid | Anabolism | Heme | No |
| | dehydratase | | Anabolism | Induction |
| NCU06189 | 5-aminolevulinate synthase | Anabolism | Heme | No |
| | | | Synthesis | Induction |
| NCU05165 | pyridoxamine phosphate oxidase | Anabolism | Vitamin | No |
| | | | Metabolism | Induction |
| NCU04865 | polyketide synthase 3 | Anabolism | | Partial |
| | | | | Repression |
| NCU05011 | polyketide synthase 2 | Anabolism | | WT |
| | | | | Induction |
| NCU00762 | endoglucanase 3 | Carbon | Cellulases | No |
| | | Metabolism | | Induction |
| NCU00836 | hypothetical protein | Carbon | Cellulases | No |
| | | Metabolism | | Induction |
| NCU01050 | endoglucanase II | Carbon | Cellulases | No |
| | | Metabolism | | Induction |
| NCU02240 | endoglucanase II | Carbon | Cellulases | No |
| | | Metabolism | | Induction |
| NCU02344 | fungal cellulose binding domain- | Carbon | Cellulases | No |
| | containing | Metabolism | | Induction |
| NCU02916 | endoglucanase II | Carbon | Cellulases | No |
| | | Metabolism | | Induction |
| NCU03328 | endoglucanase II | Carbon | Cellulases | No |
| | | Metabolism | | Induction |
| NCU04854 | endoglucanase EG-1 | Carbon | Cellulases | No |
| | | Metabolism | | Induction |
| NCU05057 | endoglucanase EG-1 | Carbon | Cellulases | No |
| | | Metabolism | | Induction |
| NCU05121 | endoglucanase V | Carbon | Cellulases | No |
| | | Metabolism | | Induction |
| NCU07190 | exoglucanase 3 | Carbon | Cellulases | No |
| | | Metabolism | | Induction |
| NCU07340 | exoglucanase 1 | Carbon | Cellulases | No |
| | | Metabolism | | Induction |
| NCU07760 | endoglucanase IV | Carbon | Cellulases | No |
| | | Metabolism | | Induction |
| NCU07898 | endoglucanase IV | Carbon | Cellulases | No |
| | | Metabolism | | Induction |
| NCU08760 | endoglucanase II | Carbon | Cellulases | No |
| | | Metabolism | | Induction |
| NCU09680 | exoglucanase 2 | Carbon | Cellulases | No |
| | | Metabolism | | Induction |
| NCU03322 | GDSL family lipase | Carbon | Fatty Acid/ | WT |
| | | Metabolism | Isoprenoid | Induction |
| | | | Metabolism | |
| NCU07362 | L-lactate ferricytochrome c | Carbon | Fermentation | Partial |
| | oxidoreductase | Metabolism | | Repression |
| NCU03813 | formate dehydrogenase | Carbon | Fermentation | WT |
| | | Metabolism | | Induction |
| NCU04539 | L-lactate dehydrogenase | Carbon | Fermentation | WT |
| | | Metabolism | | Repression |
| NCU08687 | galactokinase | Carbon | Galactose | No |
| | | Metabolism | Utilization | Induction |
| NCU05133 | related to UDP-glucose 4-epimerase | Carbon | Galactose | WT |
| | | Metabolism | Utilization | Induction |
| NCU09705 | GAL10 | Carbon | Galactose | WT |
| | | Metabolism | Utilization | Induction |
| NCU07277 | anchored cell wall protein 8 | Carbon | Glycogen/Starch | WT |
| | | Metabolism | Utilization | Induction |
| NCU04797 | fructose-1,6-bisphosphatase | Carbon | Glycolysis | No |
| | | Metabolism | | Repression |
| NCU00575 | glucokinase | Carbon | Glycolysis | Partial |
| | | Metabolism | | Induction |
| NCU04401 | fructose-bisphosphate aldolase | Carbon | Glycolysis | WT |
| | | Metabolism | | Induction |
| NCU02855 | endo-1,4-beta-xylanase A | Carbon | Hemicellulases | No |
| | | Metabolism | | Induction |
| NCU05924 | endo-1,4-beta-xylanase | Carbon | Hemicellulases | No |
| | | Metabolism | | Induction |
| NCU05955 | Cel74a | Carbon | Hemicellulases | No |
| | | Metabolism | | Induction |
| NCU07326 | hypothetical protein | Carbon | Hemicellulases | No |
| | | Metabolism | | Induction |
| NCU09775 | alpha-N-arabinofuranosidase | Carbon | Hemicellulases | No |
| | | Metabolism | | Induction |
| NCU04997 | xylanase | Carbon | Hemicellulases | Partial |
| | | Metabolism | | Induction |
| NCU01900 | xylosidase/arabinosidase | Carbon | Hemicellulases | WT |
| | | Metabolism | | Induction |
| NCU02343 | alpha-L-arabinofuranosidase 2 | Carbon | Hemicellulases | WT |
| | | Metabolism | | Induction |
| NCU07225 | endo-1,4-beta-xylanase 2 | Carbon | Hemicellulases | WT |
| | | Metabolism | | Induction |
| NCU08087 | hypothetical protein | Carbon | Hemicellulases | WT |
| | | Metabolism | | Induction |
| NCU08189 | endo-1,4-beta-xylanase | Carbon | Hemicellulases | WT |
| | | Metabolism | | Induction |
| NCU09652 | beta-xylosidase | Carbon | Hemicellulases | WT |
| | | Metabolism | | Induction |
| NCU06881 | succinyl-CoA:3-ketoacid-coenzyme | Carbon | Ketone | No |
| | A transferase | Metabolism | Metabolism | Repression |
| NCU01853 | choline dehydrogenase | Carbon | Lipid/Isoprenoid | No |
| | | Metabolism | Metabolism | Repression |
| NCU02287 | acyl-CoA dehydrogenase | Carbon | Lipid/Isoprenoid | No |
| | | Metabolism | Metabolism | Repression |
| NCU02894 | flavin-binding monooxygenase | Carbon | Lipid/Isoprenoid | No |
| | | Metabolism | Metabolism | Repression |
| NCU07263 | carnitine/acyl carnitine carrier | Carbon | Lipid/Isoprenoid | No |
| | | Metabolism | Metabolism | Repression |
| NCU08924 | acyl-CoA dehydrogenase | Carbon | Lipid/Isoprenoid | No |
| | | Metabolism | Metabolism | Repression |
| NCU09692 | phosphatidic acid phosphatase beta | Carbon | Lipid/Isoprenoid | No |
| | | Metabolism | Metabolism | Repression |
| NCU04796 | 3-ketoacyl-CoA thiolase | Carbon | Lipid/Isoprenoid | No |
| | | Metabolism | Metabolism | Repression |
| NCU09732 | acetyl-CoA acetyltransferase | Carbon | Lipid/Isoprenoid | No |
| | | Metabolism | Metabolism | Repression |
| NCU07719 | isopentenyl-diphosphate delta- | Carbon | Lipid/Isoprenoid | Partial |
| | isomerase | Metabolism | Metabolism | Repression |
| NCU12093 | N-acyl-phosphatidylethanolamine- | Carbon | Lipid/Isoprenoid | Partial |
| | hydrolyzing | Metabolism | Metabolism | Repression |
| NCU05818 | phosphatidyl synthase | Carbon | Lipid/Isoprenoid | WT |
| | | Metabolism | Metabolism | Repression |
| NCU04078 | NAD-dependent methanol | Carbon | Methanol | No |
| | dehydrogenase | Metabolism | Oxidation | Repression |
| NCU07617 | Acr1 | Carbon | Mitochondrial | WT |
| | | Metabolism | Carrier | Repression |
| NCU08398 | aldose 1-epimerase | Carbon | Monnosaccharide | No |
| | | Metabolism | Metabolism | Induction |
| NCU10683 | NRS/ER | Carbon | Monnosaccharide | No |
| | | Metabolism | Metabolism | Induction |
| NCU10063 | sugar isomerase | Carbon | Monnosaccharide | Partial |
| | | Metabolism | Metabolism | Repression |
| NCU04933 | nucleoside-diphosphate-sugar | Carbon | Monnosaccharide | WT |
| | epimerase | Metabolism | Metabolism | Induction |
| NCU00890 | beta-mannosidase | Carbon | Oligosaccharide | No |
| | | Metabolism | Degredation | Induction |
| NCU04623 | beta-galactosidase | Carbon | Oligosaccharide | No |
| | | Metabolism | Degredation | Induction |
| NCU04952 | beta-D-glucoside glucohydrolase | Carbon | Oligosaccharide | No |
| | | Metabolism | Degredation | Induction |
| NCU05956 | beta-galactosidase | Carbon | Oligosaccharide | No |
| | | Metabolism | Degredation | Induction |
| NCU07487 | periplasmic beta-glucosidase | Carbon | Oligosaccharide | No |
| | | Metabolism | Degredation | Induction |
| NCU08755 | beta-glucosidase 1 | Carbon | Oligosaccharide | No |
| | | Metabolism | Degredation | Induction |
| NCU00130 | beta-glucosidase | Carbon | Oligosaccharide | Partial |
| | | Metabolism | Degredation | Induction |
| NCU00709 | beta-xylosidase | Carbon | Oligosaccharide | WT |
| | | Metabolism | Degredation | Induction |
| NCU04168 | hypothetical protein | Carbon | Oligosaccharide | WT |
| | | Metabolism | Degredation | Induction |
| NCU09904 | glucan 1,3-beta-glucosidase | Carbon | Oligosaccharide | WT |
| | | Metabolism | Degredation | Induction |
| NCU09923 | beta-xylosidase | Carbon | Oligosaccharide | WT |
| | | Metabolism | Degredation | Induction |
| NCU03098 | glycosyl hydrolase | Carbon | Oligosaccharide | WT |
| | | Metabolism | Degredation | Repression |
| NCU09028 | class I alpha-mannosidase | Carbon | Oligosaccharide | WT |
| | | Metabolism | Degredation | Repression |
| NCU09281 | alpha-glucosidase | Carbon | Oligosaccharide | WT |
| | | Metabolism | Degredation | Repression |
| NCU10107 | ribose 5-phosphate isomerase | Carbon | Pentose | WT |
| | | Metabolism | Phosphate | Induction |
| | | | Pathway | |
| NCU00206 | cellobiose dehydrogenase | Carbon | Polysaccharide | No |
| | | Metabolism | Degradation | Induction |
| NCU00710 | acetyl xylan esterase | Carbon | Polysaccharide | No |
| | | Metabolism | Degradation | Induction |
| NCU01059 | glycosyl hydrolase family 47 protein | Carbon | Polysaccharide | No |
| | | Metabolism | Degradation | Induction |
| NCU03181 | acetylxylan esterase | Carbon | Polysaccharide | No |
| | | Metabolism | Degradation | Induction |
| NCU04494 | acetyl xylan esterase | Carbon | Polysaccharide | No |
| | | Metabolism | Degradation | Induction |
| NCU05598 | rhamnogalacturonase B | Carbon | Polysaccharide | No |
| | | Metabolism | Degradation | Induction |
| NCU05751 | cellulose-binding protein | Carbon | Polysaccharide | No |
| | | Metabolism | Degradation | Induction |
| NCU08176 | pectate lyase A | Carbon | Polysaccharide | No |
| | | Metabolism | Degradation | Induction |
| NCU08746 | starch binding domain-containing | Carbon | Polysaccharide | No |
| | protein | Metabolism | Degradation | Induction |
| NCU08785 | fungal cellulose binding domain- | Carbon | Polysaccharide | No |
| | containing | Metabolism | Degradation | Induction |
| NCU09445 | Cip2 | Carbon | Polysaccharide | No |
| | | Metabolism | Degradation | Induction |
| NCU09491 | feruloyl esterase B | Carbon | Polysaccharide | No |
| | | Metabolism | Degradation | Induction |
| NCU09582 | chitin deacetylase | Carbon | Polysaccharide | No |
| | | Metabolism | Degradation | Induction |
| NCU09764 | hypothetical protein | Carbon | Polysaccharide | No |
| | | Metabolism | Degradation | Induction |
| NCU09774 | cellulase | Carbon | Polysaccharide | No |
| | | Metabolism | Degradation | Induction |
| NCU09976 | rhamnogalacturonan acetylesterase | Carbon | Polysaccharide | No |
| | | Metabolism | Degradation | Induction |
| NCU10045 | pectinesterase | Carbon | Polysaccharide | No |
| | | Metabolism | Degradation | Induction |
| NCU11068 | endo-beta-1,4-mannanase | Carbon | Polysaccharide | No |
| | | Metabolism | Degradation | Induction |
| NCU11198 | arabinogalactan endo-1,4-beta- | Carbon | Polysaccharide | No |
| | galactosidase | Metabolism | Degradation | Induction |
| NCU02904 | alpha/beta hydrolase fold protein | Carbon | Polysaccharide | Partial |
| | | Metabolism | Degradation | Induction |
| NCU04870 | acetyl xylan esterase | Carbon | Polysaccharide | Partial |
| | | Metabolism | Degradation | Induction |
| NCU05159 | acetylxylan esterase | Carbon | Polysaccharide | Partial |
| | | Metabolism | Degradation | Induction |
| NCU09518 | glucooligosaccharide oxidase | Carbon | Polysaccharide | Partial |
| | | Metabolism | Degradation | Induction |
| NCU09664 | acetylxylan esterase | Carbon | Polysaccharide | Partial |
| | | Metabolism | Degradation | Induction |
| NCU09924 | BNR/Asp-box repeat protein | Carbon | Polysaccharide | Partial |
| | | Metabolism | Degradation | Induction |
| NCU03158 | alpha/beta hydrolase | Carbon | Polysaccharide | Partial |
| | | Metabolism | Degradation | Repression |
| NCU07067 | mannosyl-oligosaccharide alpha- | Carbon | Polysaccharide | Partial |
| | 1,2-mannosidase | Metabolism | Degradation | Repression |
| NCU01353 | mixed-linked glucanase | Carbon | Polysaccharide | WT |
| | | Metabolism | Degradation | Induction |
| NCU07269 | alpha-1,2-mannosidase | Carbon | Polysaccharide | WT |
| | | Metabolism | Degradation | Repression |
| NCU06023 | catabolic 3-dehydroquinase | Carbon | Quinnic Acid | Partial |
| | | Metabolism | Utilization | Repression |
| NCU06025 | shikimate/quinate 5-dehydrogenase | Carbon | Quinnic Acid | WT |
| | | Metabolism | Utilization | Repression |
| NCU00761 | triacylglycerol lipase | Carbon | Secreted | No |
| | | Metabolism | Lipases/Esterases | Induction |
| NCU06650 | secretory phospholipase A2 | Carbon | Secreted | No |
| | | Metabolism | Lipases/Esterases | Induction |
| NCU09416 | cellulose-binding GDSL | Carbon | Secreted | Partial |
| | lipase/acylhydrolase | Metabolism | Lipases/Esterases | Induction |
| NCU00292 | cholinesterase | Carbon | Secreted | WT |
| | | Metabolism | Lipases/Esterases | Induction |
| NCU03903 | lipase/esterase | Carbon | Secreted | WT |
| | | Metabolism | Lipases/Esterases | Induction |
| NCU04475 | lipase B | Carbon | Secreted | WT |
| | | Metabolism | Lipases/Esterases | Induction |
| NCU06364 | GDSL lipase/acylhydrolase | Carbon | Secreted | WT |
| | | Metabolism | Lipases/Esterases | Induction |
| NCU09575 | sterol esterase | Carbon | Secreted | WT |
| | | Metabolism | Lipases/Esterases | Repression |
| NCU04230 | isocitrate lyase | Carbon | TCA | No |
| | | Metabolism | | Repression |
| NCU02366 | aconitase | Carbon | TCA | WT |
| | | Metabolism | | Repression |
| NCU04280 | aconitate hydratase | Carbon | TCA | WT |
| | | Metabolism | | Repression |
| NCU04385 | 3-isopropylmalate dehydratase | Carbon | TCA | WT |
| | | Metabolism | | Repression |
| NCU02969 | alkaline ceramidase | Carbon | Transcription | WT |
| | | Metabolism | Factors | Repression |
| NCU08164 | retinol dehydrogenase 13 | Carbon | Vitamin | Partial |
| | | Metabolism | Metabolism | Induction |
| NCU00891 | xylitol dehydrogenase | Carbon | Xylose | WT |
| | | Metabolism | Utilization | Induction |
| NCU08384 | xylose reductase | Carbon | Xylose | WT |
| | | Metabolism | Utilization | Induction |
| NCU08272 | cytochrome b2 | Carbon | | No |
| | | Metabolism | | Repression |
| NCU07619 | FAD binding domain-containing | Carbon | | Partial |
| | protein | Metabolism | | Repression |
| NCU05304 | nuclear segregation protein | Cell Cycle | | No |
| | | | | Induction |
| NCU01510 | meiotically up-regulated 190 | Cell Cycle | | No |
| | protein | | | Repression |
| NCU05768 | mating response protein POI2 | Cell Cycle | | Partial |
| | | | | Repression |
| NCU07154 | yippee family protein | Cell Cycle | | Partial |
| | | | | Repression |
| NCU01998 | septin | Cell Cycle | | WT |
| | | | | Induction |
| NCU08457 | rodlet protein | Cellular | Ascospore | WT |
| | | Components | | Repression |
| NCU06386 | dolichyl-phosphate beta- | Cellular | Cell Wall | No |
| | glucosyltransferase | Components | Synthesis or | Induction |
| | | | Modifcation | |
| NCU09425 | NdvB protein | Cellular | Cell Wall | Partial |
| | | Components | Synthesis or | Induction |
| | | | Modifcation | |
| NCU02478 | alpha-1,3-glucan synthase Ags2 | Cellular | Cell Wall | WT |
| | | Components | Synthesis or | Induction |
| | | | Modifcation | |
| NCU09175 | GPI-anchored cell wall beta-1,3- | Cellular | Cell Wall | WT |
| | endoglucanase | Components | Synthesis or | Induction |
| | | | Modifcation | |
| NCU01689 | mitochondrial DNA replication | Cellular | Mitochondrial | No |
| | protein YHM2 | Components | Reproduction | Induction |
| NCU11721 | mitochondrial inner membrane | Cellular | Mitochondrial | No |
| | protease subunit 2 | Components | Reproduction | Induction |
| NCU02396 | mitochondrial FAD-linked | Cellular | Mitochondrial | No |
| | sulfhydryl oxidase | Components | Reproduction | Repression |
| NCU07481 | morphogenesis protein | Cellular | Morphology | WT |
| | | Components | | Induction |
| NCU03137 | nuclear elongation and deformation | Classification | | No |
| | protein 1 | Unclear | | Induction |
| NCU02500 | clock-controlled pheromone CCG-4 | Clock | | No |
| | | Controlled | | Induction |
| NCU00565 | lipoic acid synthetase | Cofactors | | No |
| | | | | Repression |
| NCU02705 | F1F0 ATP synthase assembly | Electron | | No |
| | protein Atp10 | transport chain | | Repression |
| NCU05225 | mitochondrial NADH | Electron | | Partial |
| | dehydrogenase | transport chain | | Repression |
| NCU08326 | mitochondrial carrier protein | Fermentation | | No |
| | LEU5 | | | Repression |
| NCU00326 | calcium homeostasis protein | Ion | | No |
| | Regucalcin | Binding | | Induction |
| NCU08691 | EF-hand calcium-binding domain- | Ion | | WT |
| | containing | Binding | | Repression |
| NCU09043 | caleosin domain-containing protein | Lipid | | Partial |
| | | Associated | | Repression |
| NCU07432 | tetraspanin | Membrane | | Partial |
| | | Associated | | Induction |
| NCU05841 | UMTA | Methyl | | Partial |
| | | transferase | | Induction |
| NCU02361 | formamidase | Nitrogen | | No |
| | | and Sulfur | | Repression |
| | | Metabolism | | |
| NCU10051 | flavohemoglobin | Nitrogen | | Partial |
| | | Metabolism | | Induction |
| NCU04720 | nitrite reductase | Nitrogen | | WT |
| | | Metabolism | | Induction |
| NCU04698 | spermine/spermidine synthase | Nucleotide | | Partial |
| | | Binding | | Induction |
| NCU00177 | phosphoribosylformylglycinamidine | Nucleotide | | No |
| | cyclo-ligase | Metabolism | | Induction |
| NCU01786 | ribose-phosphate | Nucleotide | | No |
| | pyrophosphokinase II | Metabolism | | Induction |
| NCU03117 | inosine-5′-monophosphate | Nucleotide | | No |
| | dehydrogenase IMD2 | Metabolism | | Induction |
| NCU05254 | ribose-phosphate | Nucleotide | | No |
| | pyrophosphokinase | Metabolism | | Induction |
| NCU03963 | 5′-methylthioadenosine | Nucleotide | | No |
| | phosphorylase | Metabolism | | Induction |
| NCU09659 | 5′-nucleotidase | Nucleotide | | No |
| | | Metabolism | | Repression |
| NCU03488 | orotidine-5′-phosphate | Nucleotide | | Partial |
| | decarboxylase Pyr-4 | Metabolism | | Repression |
| NCU02657 | s-adenosylmethionine synthetase | Other | | No |
| | | | | Induction |
| NCU05855 | O-methyltransferase | Other | | No |
| | | | | Induction |
| NCU08044 | oxidoreductase | Other | | No |
| | | | | Induction |
| NCU09283 | acetyltransferase | Other | | No |
| | | | | Induction |
| NCU11243 | alcohol dehydrogenase | Other | | No |
| | | | | Induction |
| NCU01378 | acetoacetyl-CoA synthase | Other | | No |
| | | | | Repression |
| NCU01861 | short chain | Other | | No |
| | dehydrogenase/reductase family | | | Repression |
| NCU04583 | acetyltransferase | Other | | No |
| | | | | Repression |
| NCU06616 | S-adenosylmethionine-dependent | Other | | No |
| | | | | Repression |
| NCU07325 | conidiation-specific protein con-10 | Other | | No |
| | | | | Repression |
| NCU08771 | acetolactate synthase | Other | | No |
| | | | | Repression |
| NCU09553 | 3-hydroxybutyryl CoA | Other | | No |
| | dehydrogenase | | | Repression |
| NCU10055 | opsin-1 | Other | | No |
| | | | | Repression |
| NCU11289 | aldo-keto reductase | Other | | No |
| | | | | Repression |
| NCU08750 | isoamyl alcohol oxidase | Other | | Partial |
| | | | | Induction |
| NCU08752 | acetylcholinesterase | Other | | Partial |
| | | | | Induction |
| NCU03049 | flavin-binding monooxygenase | Other | | Partial |
| | | | | Repression |
| NCU05653 | carbonic anhydrase | Other | | Partial |
| | | | | Repression |
| NCU07133 | metallo-beta-lactamase superfamily | Other | | Partial |
| | protein | | | Repression |
| NCU08925 | amine oxidase | Other | | Partial |
| | | | | Repression |
| NCU09865 | methylase | Other | | Partial |
| | | | | Repression |
| NCU11365 | aminotransferase | Other | | Partial |
| | | | | Repression |
| NCU07055 | monooxygenase | Other | | WT |
| | | | | Induction |
| NCU07224 | monooxygenase | Other | | WT |
| | | | | Induction |
| NCU01061 | dienelactone hydrolase | Other | | WT |
| | | | | Repression |
| NCU03566 | short chain | Other | | WT |
| | dehydrogenase/reductase | | | Repression |
| NCU04260 | oxidoreductase domain-containing | Other | | WT |
| | protein | | | Repression |
| NCU05094 | short chain | Other | | WT |
| | dehydrogenase/reductase | | | Repression |
| NCU05986 | sucrase/ferredoxin domain- | Other | | WT |
| | containing protein | | | Repression |
| NCU06153 | monooxygenase | Other | | WT |
| | | | | Repression |
| NCU09674 | O-methyltransferase family 3 | Other | | WT |
| | | | | Repression |
| NCU11241 | nuclease domain-containing protein | Other | | WT |
| | | | | Repression |
| NCU03013 | anchored cell wall protein 10 | Oxidoreductase | Superoxide | WT |
| | | | dismutase | Induction |
| NCU05319 | LysM domain-containing protein | Peptidoglycan | | Partial |
| | | Binding | | Induction |
| NCU04430 | leupeptin-inactivating enzyme 1 | Protease | Protease | WT |
| | | | Activator | Induction |
| NCU02059 | endothiapepsin | Protease | | No |
| | | | | Induction |
| NCU00831 | extracellular serine | Protease | | No |
| | carboxypeptidase | | | Repression |
| NCU06055 | extracellular alkaline protease | Protease | | Partial |
| | | | | Induction |
| NCU00263 | serin endopeptidase | Protease | | WT |
| | | | | Induction |
| NCU07200 | metalloprotease 1 | Protease | | WT |
| | | | | Induction |
| NCU09992 | serine peptidase | Protease | | WT |
| | | | | Induction |
| NCU09265 | calreticulin | Protein Synthesis | Protein | No |
| | | and Secretion | Folding | Induction |
| NCU00813 | disulfide isomerase | Protein Synthesis | Protein | No |
| | | and Secretion | Folding | Induction |
| NCU02455 | FKBP-type peptidyl-prolyl cis-trans | Protein Synthesis | Protein | No |
| | isomerase | and Secretion | Folding | Induction |
| NCU09223 | protein disulfide-isomerase | Protein Synthesis | Protein | No |
| | | and Secretion | Folding | Induction |
| NCU09485 | related to stress protein ORP150 | Protein Synthesis | Protein | No |
| | | and Secretion | Folding | Induction |
| NCU01648 | dolichyl-phosphate-mannose- | Protein Synthesis | Protein | No |
| | protein | and Secretion | Modification | Induction |
| NCU10497 | oligosaccharyl transferase STT3 | Protein Synthesis | Protein | No |
| | subunit | and Secretion | Modification | Induction |
| NCU00669 | oligosaccharyl transferase subunit | Protein Synthesis | Protein | No |
| | | and Secretion | Modification | Induction |
| NCU02118 | palmitoyltransferase PFA4 | Protein Synthesis | Protein | No |
| | | and Secretion | Modification | Repression |
| NCU10762 | UDP-N-acetyl-glucosamine-1-P | Protein Synthesis | Protein | Partial |
| | transferase Alg7 | and Secretion | Modification | Induction |
| NCU00244 | glycosyl transferase | Protein Synthesis | Protein | WT |
| | | and Secretion | Modification | Repression |
| NCU01068 | BAR domain-containing protein | Protein Synthesis | Protein | No |
| | | and Secretion | Trafficing | Induction |
| NCU03319 | COPII-coated vesicle protein | Protein Synthesis | Protein | No |
| | SurF4/Erv29 | and Secretion | Trafficing | Induction |
| NCU08761 | vacuolar sorting receptor | Protein Synthesis | Protein | No |
| | | and Secretion | Trafficing | Induction |
| NCU01279 | ER membrane protein | Protein Synthesis | Protein | No |
| | | and Secretion | Trafficing | Repression |
| NCU03819 | COPII coat assembly protein sec-16 | Protein Synthesis | Protein | Partial |
| | | and Secretion | Trafficing | Induction |
| NCU08607 | endoplasmic reticulum-Golgi | Protein Synthesis | Protein | Partial |
| | intermediate | and Secretion | Trafficing | Induction |
| NCU09195 | vacuolar membrane PQ loop repeat | Protein Synthesis | Protein | Partial |
| | protein | and Secretion | Trafficing | Repression |
| NCU07736 | PEP5 | Protein Synthesis | Protein | WT |
| | | and Secretion | Trafficing | Induction |
| NCU01290 | centromere/microtubule-binding | Protein Synthesis | rRNA | No |
| | protein CBF5 | and Secretion | Production | Induction |
| NCU03396 | nucleolar protein nop-58 | Protein Synthesis | rRNA | No |
| | | and Secretion | Production | Induction |
| NCU09521 | ribosome biogenesis protein | Protein Synthesis | rRNA | No |
| | | and Secretion | Production | Induction |
| NCU03897 | RNA binding effector protein | Protein Synthesis | Translation | No |
| | Scp160 | and Secretion | | Induction |
| NCU07746 | F-box domain-containing protein | Protein Synthesis | Translocation | No |
| | | and Secretion | | Induction |
| NCU08897 | protein transporter SEC61 subunit | Protein Synthesis | Translocation | No |
| | alpha | and Secretion | | Induction |
| NCU00169 | translocation complex componenet | Protein Synthesis | Translocation | No |
| | | and Secretion | | Induction |
| NCU02681 | translocation protein | Protein Synthesis | Translocation | No |
| | | and Secretion | | Induction |
| NCU06333 | translocation protein SEC62 | Protein Synthesis | Translocation | No |
| | | and Secretion | | Induction |
| NCU01146 | signal sequence receptor alpha | Protein Synthesis | Translocation | Partial |
| | chain | and Secretion | | Induction |
| NCU00931 | lysyl-tRNA synthetase | Protein Synthesis | tRNA | No |
| | | and Secretion | Charging | Induction |
| NCU07008 | carotenoid oxygenase 1 | Secondary | Carotenoid | WT |
| | | Metabolism | Synthesis | Repression |
| NCU03295 | 4-coumarate-CoA ligase 1 | Secondary | | No |
| | | Metabolism | | Repression |
| NCU07737 | salicylate hydroxylase | Secondary | | WT |
| | | Metabolism | | Induction |
| NCU08038 | CAS1 | Signal | Adenlyate | Partial |
| | | Transduction | Cyclase Control | Induction |
| NCU02729 | transducin family protein | Signal | | No |
| | | Transduction | | Induction |
| NCU03364 | DENN domain-containing protein | Signal | | No |
| | | Transduction | | Induction |
| NCU03817 | FMI1 protein | Signal | | Partial |
| | | Transduction | | Repression |
| NCU06111 | GTPase Ras2p | Signal | | WT |
| | | Transduction | | Repression |
| NCU08115 | DNA mismatch repair protein | Stress | | Partial |
| | Msh3 | Response | | Induction |
| NCU06931 | sulfite oxidase | Sulfur | | No |
| | | Metabolism | | Repression |
| NCU04077 | assimilatory sulfite reductase | Sulfur | | Partial |
| | | Metabolism | | Induction |
| NCU01862 | SWIRM domain-containing protein | Transcriptional | Chromatin | No |
| | FUN19 | Regulation | Remodeling | Repression |
| NCU02795 | histone deacetylase phd1 | Transcriptional | Chromatin | WT |
| | | Regulation | Remodeling | Induction |
| NCU00812 | exosome complex exonuclease | Transcriptional | RNA | No |
| | RRP41 | Regulation | processing | Induction |
| NCU01856 | transcriptional activator hac1 | Transcriptional | Transcription | No |
| | | Regulation | Factors | Induction |
| NCU03725 | VIB-1 | Transcriptional | Transcription | No |
| | | Regulation | Factors | Induction |
| NCU06971 | transcriptional activator xlnR | Transcriptional | Transcription | No |
| | | Regulation | Factors | Induction |
| NCU07705 | C6 finger domain-containing | Transcriptional | Transcription | No |
| | protein | Regulation | Factors | Induction |
| NCU08042 | fungal specific transcription factor | Transcriptional | Transcription | No |
| | | Regulation | Factors | Induction |
| NCU03643 | cutinase transcription factor 1 beta | Transcriptional | Transcription | No |
| | | Regulation | Factors | Repression |
| NCU03043 | C2H2 finger domain-containing | Transcriptional | Transcription | Partial |
| | protein FlbC | Regulation | Factors | Repression |
| NCU05767 | PRO1A C6 Zink-finger protein | Transcriptional | Transcription | WT |
| | | Regulation | Factors | Repression |
| NCU00316 | peroxisomal adenine nucleotide | Transporter | Amino Acid | No |
| | transporter 1 | | Transporter | Repression |
| NCU00721 | proline-specific permease | Transporter | Amino Acid | No |
| | | | Transporter | Repression |
| NCU07578 | peroxisomal adenine nucleotide | Transporter | Amino Acid | No |
| | transporter 1 | | Transporter | Repression |
| NCU04435 | general amino acid permease AGP3 | Transporter | Amino Acid | Partial |
| | | | Transporter | Repression |
| NCU05198 | general amino acid permease | Transporter | Amino Acid | Partial |
| | | | Transporter | Repression |
| NCU10721 | solute carrier family 35 member B1 | Transporter | Carbohydrate | No |
| | protein | | Transport | Induction |
| NCU11342 | MFS hexose transporter | Transporter | Carbohydrate | No |
| | | | Transport | Induction |
| NCU00821 | sugar transporter | Transporter | Carbohydrate | No |
| | | | Transport | Repression |
| NCU08561 | succinate/fumarate mitochondrial | Transporter | Carbohydrate | No |
| | transporter | | Transport | Repression |
| NCU09287 | sugar transporter | Transporter | Carbohydrate | No |
| | | | Transport | Repression |
| NCU00801 | MFS lactose permease | Transporter | Carbohydrate | Partial |
| | | | Transport | Induction |
| NCU00809 | MFS monosaccharide transporter | Transporter | Carbohydrate | Partial |
| | | | Transport | Induction |
| NCU07668 | MFS multidrug transporter | Transporter | Carbohydrate | Partial |
| | | | Transport | Induction |
| NCU05089 | MFS monocarboxylate transporter | Transporter | Carbohydrate | Partial |
| | | | Transport | Repression |
| NCU08152 | high affinity glucose transporter | Transporter | Carbohydrate | Partial |
| | | | Transport | Repression |
| NCU01633 | hexose transporter HXT13 | Transporter | Carbohydrate | WT |
| | | | Transport | Induction |
| NCU04537 | monosaccharide transporter | Transporter | Carbohydrate | WT |
| | | | Transport | Induction |
| NCU05853 | MFS sugar transporter | Transporter | Carbohydrate | WT |
| | | | Transport | Induction |
| NCU08114 | hexose transporter | Transporter | Carbohydrate | WT |
| | | | Transport | Induction |
| NCU00023 | ferric reductase | Transporter | Ion | No |
| | | | Transporter | Induction |
| NCU02009 | FreB | Transporter | Ion | No |
| | | | Transporter | Induction |
| NCU07068 | K(+)/H(+) antiporter 1 | Transporter | Ion | No |
| | | | Transporter | Repression |
| NCU03305 | calcium-transporting ATPase | Transporter | Ion | Partial |
| | | | Transporter | Induction |
| NCU08225 | high affinity nickel transporter nic1 | Transporter | Ion | Partial |
| | | | Transporter | Repression |
| NCU08147 | Na or K P-type ATPase | Transporter | Ion | Partial |
| | | | Transporter | Repression |
| NCU06366 | Ca2+/H+ antiporter | Transporter | Ion | WT |
| | | | Transporter | Repression |
| NCU05585 | MFS quinate transporter | Transporter | Quinate | Partial |
| | | | | Repression |
| NCU06138 | quinate permease | Transporter | Quinate | WT |
| | | | | Induction |
| NCU05591 | ABC transporter CDR4 | Transporter | Trehalose | WT |
| | | | Export | Induction |
| NCU06032 | long-chain fatty acid transporter | Transporter | | No |
| | | | | Induction |
| NCU09098 | tetracycline transporter | Transporter | | No |
| | | | | Induction |
| NCU10009 | ATP-binding cassette transporter | Transporter | | No |
| | | | | Induction |
| NCU00290 | ABC transporter | Transporter | | No |
| | | | | Repression |
| NCU09580 | MSF membrane transporter | Transporter | | No |
| | | | | Repression |
| NCU00803 | MFS transporter, variant | Transporter | | Partial |
| | | | | Repression |
| NCU04374 | MFS transporter | Transporter | | Partial |
| | | | | Repression |
| NCU08425 | major facilitator superfamily | Transporter | | Partial |
| | transporter MFS_1 | | | Repression |
| NCU04097 | ABC transporter | Transporter | | WT |
| | | | | Induction |
| NCU05079 | MFS peptide transporter | Transporter | | WT |
| | | | | Induction |
| NCU07546 | multidrug resistance protein MDR | Transporter | | WT |
| | | | | Induction |
| NCU08148 | H+/nucleoside cotransporter | Transporter | | WT |
| | | | | Induction |
| NCU03107 | MFS transporter | Transporter | | WT |
| | | | | Repression |
| NCU00586 | non-anchored cell wall protein 6 | Unknown Cell | | No |
| | | Wall | | Repression |
| NCU00716 | non-anchored cell wall protein 5 | Unknown Cell | | No |
| | | Wall | | Repression |
| NCU00025 | integral membrane protein | Unknown | | Partial |
| | | Membrane | | Repression |
| | | Proteins | | |
| NCU00848 | integral membrane protein TmpA | Unknown | | WT |
| | | Membrane | | Repression |
| | | Proteins | | |
| NCU00449 | hypothetical protein | Unknown | | No |
| | | Secreted | | Induction |
| NCU00849 | hypothetical protein | Unknown | | No |
| | | Secreted | | Induction |
| NCU01058 | hypothetical protein | Unknown | | No |
| | | Secreted | | Induction |
| NCU01076 | hypothetical protein | Unknown | | No |
| | | Secreted | | Induction |
| NCU01196 | hypothetical protein | Unknown | | No |
| | | Secreted | | Induction |
| NCU01978 | hypothetical protein | Unknown | | No |
| | | Secreted | | Induction |
| NCU02138 | hypothetical protein | Unknown | | No |
| | | Secreted | | Induction |
| NCU03083 | hypothetical protein | Unknown | | No |
| | | Secreted | | Induction |
| NCU03982 | glucose-regulated protein | Unknown | | No |
| | | Secreted | | Induction |
| NCU04948 | hypothetical protein | Unknown | | No |
| | | Secreted | | Induction |
| NCU05230 | hypothetical protein | Unknown | | No |
| | | Secreted | | Induction |
| NCU05863 | hypothetical protein | Unknown | | No |
| | | Secreted | | Induction |
| NCU05864 | hypothetical protein | Unknown | | No |
| | | Secreted | | Induction |
| NCU06152 | hypothetical protein | Unknown | | No |
| | | Secreted | | Induction |
| NCU06607 | hypothetical protein | Unknown | | No |
| | | Secreted | | Induction |
| NCU08756 | hypothetical protein | Unknown | | No |
| | | Secreted | | Induction |
| NCU08790 | hypothetical protein | Unknown | | No |
| | | Secreted | | Induction |
| NCU09295 | hypothetical protein | Unknown | | No |
| | | Secreted | | Induction |
| NCU09524 | hypothetical protein | Unknown | | No |
| | | Secreted | | Induction |
| NCU11268 | hypothetical protein | Unknown | | No |
| | | Secreted | | Induction |
| NCU11542 | hypothetical protein | Unknown | | No |
| | | Secreted | | Induction |
| NCU11753 | hypothetical protein | Unknown | | No |
| | | Secreted | | Induction |
| NCU00175 | hypothetical protein | Unknown | | No |
| | | Secreted | | Repression |
| NCU00250 | hypothetical protein | Unknown | | No |
| | | Secreted | | Repression |
| NCU00322 | hypothetical protein | Unknown | | No |
| | | Secreted | | Repression |
| NCU00695 | hypothetical protein | Unknown | | No |
| | | Secreted | | Repression |
| NCU07311 | hypothetical protein | Unknown | | No |
| | | Secreted | | Repression |
| NCU08171 | anchored cell wall protein 12 | Unknown | | No |
| | | Secreted | | Repression |
| NCU08521 | hypothetical protein | Unknown | | No |
| | | Secreted | | Repression |
| NCU10507 | hypothetical protein | Unknown | | No |
| | | Secreted | | Repression |
| NCU07143 | 6-phosphogluconolactonase | Unknown | | Partial |
| | | Secreted | | Induction |
| NCU07222 | hypothetical protein | Unknown | | Partial |
| | | Secreted | | Induction |
| NCU08371 | hypothetical protein | Unknown | | Partial |
| | | Secreted | | Induction |
| NCU09506 | hypothetical protein | Unknown | | Partial |
| | | Secreted | | Induction |
| NCU04106 | hypothetical protein | Unknown | | Partial |
| | | Secreted | | Repression |
| NCU06526 | hypothetical protein | Unknown | | Partial |
| | | Secreted | | Repression |
| NCU09196 | hypothetical protein | Unknown | | Partial |
| | | Secreted | | Repression |
| NCU11466 | hypothetical protein | Unknown | | Partial |
| | | Secreted | | Repression |
| NCU11957 | hypothetical protein | Unknown | | Partial |
| | | Secreted | | Repression |
| NCU00995 | hypothetical protein | Unknown | | WT |
| | | Secreted | | Induction |
| NCU01720 | hypothetical protein | Unknown | | WT |
| | | Secreted | | Induction |
| NCU03293 | hypothetical protein | Unknown | | WT |
| | | Secreted | | Induction |
| NCU04169 | hypothetical protein | Unknown | | WT |
| | | Secreted | | Induction |
| NCU04170 | hypothetical protein | Unknown | | WT |
| | | Secreted | | Induction |
| NCU04467 | hypothetical protein | Unknown | | WT |
| | | Secreted | | Induction |
| NCU04932 | hypothetical protein | Unknown | | WT |
| | | Secreted | | Induction |
| NCU04998 | hypothetical protein | Unknown | | WT |
| | | Secreted | | Induction |
| NCU05134 | hypothetical protein | Unknown | | WT |
| | | Secreted | | Induction |
| NCU05350 | hypothetical protein | Unknown | | WT |
| | | Secreted | | Induction |
| NCU05829 | hypothetical protein | Unknown | | WT |
| | | Secreted | | Induction |
| NCU05852 | glucuronan lyase A | Unknown | | WT |
| | | Secreted | | Induction |
| NCU05908 | hypothetical protein | Unknown | | WT |
| | | Secreted | | Induction |
| NCU06143 | hypothetical protein | Unknown | | WT |
| | | Secreted | | Induction |
| NCU06983 | hypothetical protein | Unknown | | WT |
| | | Secreted | | Induction |
| NCU06991 | hypothetical protein | Unknown | | WT |
| | | Secreted | | Induction |
| NCU08635 | hypothetical protein | Unknown | | WT |
| | | Secreted | | Induction |
| NCU09046 | hypothetical protein | Unknown | | WT |
| | | Secreted | | Induction |
| NCU09172 | hypothetical protein | Unknown | | WT |
| | | Secreted | | Induction |
| NCU09424 | hypothetical protein | Unknown | | WT |
| | | Secreted | | Induction |
| NCU09498 | hypothetical protein | Unknown | | WT |
| | | Secreted | | Induction |
| NCU09823 | hypothetical protein | Unknown | | WT |
| | | Secreted | | Induction |
| NCU09848 | hypothetical protein | Unknown | | WT |
| | | Secreted | | Induction |
| NCU10014 | hypothetical protein | Unknown | | WT |
| | | Secreted | | Induction |
| NCU10039 | hypothetical protein | Unknown | | WT |
| | | Secreted | | Induction |
| NCU10687 | hypothetical protein | Unknown | | WT |
| | | Secreted | | Induction |
| NCU00561 | hypothetical protein | Unknown | | WT |
| | | Secreted | | Repression |
| NCU00859 | hypothetical protein | Unknown | | WT |
| | | Secreted | | Repression |
| NCU02042 | hypothetical protein | Unknown | | WT |
| | | Secreted | | Repression |
| NCU02164 | hypothetical protein | Unknown | | WT |
| | | Secreted | | Repression |
| NCU04482 | hypothetical protein | Unknown | | WT |
| | | Secreted | | Repression |
| NCU04486 | hypothetical protein | Unknown | | WT |
| | | Secreted | | Repression |
| NCU05236 | hypothetical protein | Unknown | | WT |
| | | Secreted | | Repression |
| NCU05761 | hypothetical protein | Unknown | | WT |
| | | Secreted | | Repression |
| NCU05763 | hypothetical protein | Unknown | | WT |
| | | Secreted | | Repression |
| NCU06328 | hypothetical protein | Unknown | | WT |
| | | Secreted | | Repression |
| NCU07948 | hypothetical protein | Unknown | | WT |
| | | Secreted | | Repression |
| NCU08140 | hypothetical protein | Unknown | | WT |
| | | Secreted | | Repression |
| NCU08447 | hypothetical protein | Unknown | | WT |
| | | Secreted | | Repression |
| NCU09734 | hypothetical protein | Unknown | | WT |
| | | Secreted | | Repression |
| NCU12011 | hypothetical protein | Unknown | | WT |
| | | Secreted | | Repression |
| NCU00408 | hypothetical protein | | | No |
| | | | | Induction |
| NCU00633 | hypothetical protein | | | No |
| | | | | Induction |
| NCU00870 | hypothetical protein | | | No |
| | | | | Induction |
| NCU00871 | hypothetical protein | | | No |
| | | | | Induction |
| NCU00965 | hypothetical protein | | | No |
| | | | | Induction |
| NCU01003 | hypothetical protein | | | No |
| | | | | Induction |
| NCU01049 | hypothetical protein | | | No |
| | | | | Induction |
| NCU01077 | hypothetical protein | | | No |
| | | | | Induction |
| NCU01148 | methyltransferase | | | No |
| | | | | Induction |
| NCU01944 | hypothetical protein | | | No |
| | | | | Induction |
| NCU01970 | DUF718 domain-containing protein | | | No |
| | | | | Induction |
| NCU01983 | hypothetical protein | | | No |
| | | | | Induction |
| NCU02008 | hypothetical protein | | | No |
| | | | | Induction |
| NCU02061 | hypothetical protein | | | No |
| | | | | Induction |
| NCU02600 | DUF1479 domain-containing | | | No |
| | protein | | | Induction |
| NCU02625 | hypothetical protein | | | No |
| | | | | Induction |
| NCU02720 | hypothetical protein | | | No |
| | | | | Induction |
| NCU02915 | hypothetical protein | | | No |
| | | | | Induction |
| NCU03152 | DUF1348 domain-containing | | | No |
| | protein | | | Induction |
| NCU03329 | hypothetical protein | | | No |
| | | | | Induction |
| NCU03433 | hypothetical protein | | | No |
| | | | | Induction |
| NCU04127 | hypothetical protein | | | No |
| | | | | Induction |
| NCU04522 | hypothetical protein | | | No |
| | | | | Induction |
| NCU04830 | hypothetical protein | | | No |
| | | | | Induction |
| NCU04905 | hypothetical protein | | | No |
| | | | | Induction |
| NCU05056 | hypothetical protein | | | No |
| | | | | Induction |
| NCU05170 | hypothetical protein | | | No |
| | | | | Induction |
| NCU05569 | hypothetical protein | | | No |
| | | | | Induction |
| NCU05574 | hypothetical protein, variant | | | No |
| | | | | Induction |
| NCU05846 | hypothetical protein | | | No |
| | | | | Induction |
| NCU05848 | cytochrome P450 monooxygenase | | | No |
| | | | | Induction |
| NCU05854 | hypothetical protein | | | No |
| | | | | Induction |
| NCU06214 | hypothetical protein | | | No |
| | | | | Induction |
| NCU06312 | hypothetical protein | | | No |
| | | | | Induction |
| NCU06704 | hypothetical protein | | | No |
| | | | | Induction |
| NCU07207 | hypothetical protein | | | No |
| | | | | Induction |
| NCU07336 | hypothetical protein | | | No |
| | | | | Induction |
| NCU07339 | hypothetical protein | | | No |
| | | | | Induction |
| NCU07453 | hypothetical protein | | | No |
| | | | | Induction |
| NCU07897 | hypothetical protein | | | No |
| | | | | Induction |
| NCU07979 | hypothetical protein | | | No |
| | | | | Induction |
| NCU08043 | hypothetical protein | | | No |
| | | | | Induction |
| NCU08113 | hypothetical protein | | | No |
| | | | | Induction |
| NCU08117 | hypothetical protein | | | No |
| | | | | Induction |
| NCU08379 | hypothetical protein | | | No |
| | | | | Induction |
| NCU08624 | hypothetical protein | | | No |
| | | | | Induction |
| NCU08784 | hypothetical protein | | | No |
| | | | | Induction |
| NCU09003 | hypothetical protein | | | No |
| | | | | Induction |
| NCU09426 | hypothetical protein | | | No |
| | | | | Induction |
| NCU09479 | hypothetical protein | | | No |
| | | | | Induction |
| NCU09522 | hypothetical protein | | | No |
| | | | | Induction |
| NCU09523 | hypothetical protein | | | No |
| | | | | Induction |
| NCU09689 | hypothetical protein | | | No |
| | | | | Induction |
| NCU10521 | hypothetical protein | | | No |
| | | | | Induction |
| NCU11118 | hypothetical protein | | | No |
| | | | | Induction |
| NCU11278 | hypothetical protein | | | No |
| | | | | Induction |
| NCU11327 | | | | No |
| | | | | Induction |
| NCU11397 | | | | No |
| | | | | Induction |
| NCU11690 | hypothetical protein | | | No |
| | | | | Induction |
| NCU11722 | | | | No |
| | | | | Induction |
| NCU11862 | hypothetical protein | | | No |
| | | | | Induction |
| NCU00247 | hypothetical protein | | | No |
| | | | | Repression |
| NCU01347 | hypothetical protein | | | No |
| | | | | Repression |
| NCU01598 | methyltransferase | | | No |
| | | | | Repression |
| NCU03761 | hypothetical protein | | | No |
| | | | | Repression |
| NCU04635 | hypothetical protein | | | No |
| | | | | Repression |
| NCU04667 | hypothetical protein | | | No |
| | | | | Repression |
| NCU05058 | hypothetical protein | | | No |
| | | | | Repression |
| NCU05128 | hypothetical protein | | | No |
| | | | | Repression |
| NCU06265 | hypothetical protein | | | No |
| | | | | Repression |
| NCU06615 | hypothetical protein | | | No |
| | | | | Repression |
| NCU06895 | cytochrome P450 4A5 | | | No |
| | | | | Repression |
| NCU07233 | hypothetical protein | | | No |
| | | | | Repression |
| NCU07423 | hypothetical protein | | | No |
| | | | | Repression |
| NCU07424 | hypothetical protein | | | No |
| | | | | Repression |
| NCU07895 | hypothetical protein | | | No |
| | | | | Repression |
| NCU08418 | tripeptidyl-peptidase | | | No |
| | | | | Repression |
| NCU08557 | hypothetical protein | | | No |
| | | | | Repression |
| NCU08712 | hypothetical protein | | | No |
| | | | | Repression |
| NCU09060 | hypothetical protein | | | No |
| | | | | Repression |
| NCU09231 | DUF1275 domain-containing | | | No |
| | protein | | | Repression |
| NCU09685 | hypothetical protein | | | No |
| | | | | Repression |
| NCU09958 | hypothetical protein | | | No |
| | | | | Repression |
| NCU10276 | hypothetical protein | | | No |
| | | | | Repression |
| NCU11697 | | | | No |
| | | | | Repression |
| NCU11944 | | | | No |
| | | | | Repression |
| NCU12051 | hypothetical protein | | | No |
| | | | | Repression |
| NCU12128 | | | | No |
| | | | | Repression |
| NCU12145 | hypothetical protein | | | No |
| | | | | Repression |
| NCU00289 | hypothetical protein | | | Partial |
| | | | | Induction |
| NCU00496 | hypothetical protein | | | Partial |
| | | | | Induction |
| NCU00763 | hypothetical protein | | | Partial |
| | | | | Induction |
| NCU01386 | hypothetical protein | | | Partial |
| | | | | Induction |
| NCU02485 | hypothetical protein | | | Partial |
| | | | | Induction |
| NCU02882 | hypothetical protein | | | Partial |
| | | | | Induction |
| NCU04618 | hypothetical protein | | | Partial |
| | | | | Induction |
| NCU04871 | hypothetical protein | | | Partial |
| | | | | Induction |
| NCU04904 | hypothetical protein | | | Partial |
| | | | | Induction |
| NCU05351 | hypothetical protein | | | Partial |
| | | | | Induction |
| NCU05501 | hypothetical protein | | | Partial |
| | | | | Induction |
| NCU05906 | hypothetical protein | | | Partial |
| | | | | Induction |
| NCU06373 | hypothetical protein | | | Partial |
| | | | | Induction |
| NCU07270 | hypothetical protein | | | Partial |
| | | | | Induction |
| NCU08116 | hypothetical protein | | | Partial |
| | | | | Induction |
| NCU08397 | hypothetical protein | | | Partial |
| | | | | Induction |
| NCU08748 | hypothetical protein | | | Partial |
| | | | | Induction |
| NCU08867 | hypothetical protein | | | Partial |
| | | | | Induction |
| NCU09176 | hypothetical protein | | | Partial |
| | | | | Induction |
| NCU11769 | | | | Partial |
| | | | | Induction |
| NCU11828 | | | | Partial |
| | | | | Induction |
| NCU11905 | | | | Partial |
| | | | | Induction |
| NCU00011 | hypothetical protein | | | Partial |
| | | | | Repression |
| NCU00397 | hypothetical protein | | | Partial |
| | | | | Repression |
| NCU00510 | hypothetical protein | | | Partial |
| | | | | Repression |
| NCU00935 | hypothetical protein | | | Partial |
| | | | | Repression |
| NCU01880 | hypothetical protein | | | Partial |
| | | | | Repression |
| NCU02080 | hypothetical protein | | | Partial |
| | | | | Repression |
| NCU02130 | hypothetical protein | | | Partial |
| | | | | Repression |
| NCU02163 | hypothetical protein | | | Partial |
| | | | | Repression |
| NCU02365 | hypothetical protein | | | Partial |
| | | | | Repression |
| NCU03157 | hypothetical protein | | | Partial |
| | | | | Repression |
| NCU03352 | hypothetical protein | | | Partial |
| | | | | Repression |
| NCU03398 | hypothetical protein | | | Partial |
| | | | | Repression |
| NCU03570 | hypothetical protein | | | Partial |
| | | | | Repression |
| NCU04282 | hypothetical protein | | | Partial |
| | | | | Repression |
| NCU04342 | hypothetical protein | | | Partial |
| | | | | Repression |
| NCU04360 | hypothetical protein | | | Partial |
| | | | | Repression |
| NCU04525 | hypothetical protein | | | Partial |
| | | | | Repression |
| NCU04866 | hypothetical protein | | | Partial |
| | | | | Repression |
| NCU05784 | hypothetical protein | | | Partial |
| | | | | Repression |
| NCU05951 | hypothetical protein | | | Partial |
| | | | | Repression |
| NCU05976 | hypothetical protein | | | Partial |
| | | | | Repression |
| NCU06156 | hypothetical protein | | | Partial |
| | | | | Repression |
| NCU06986 | DUF221 domain-containing protein | | | Partial |
| | | | | Repression |
| NCU07126 | hypothetical protein | | | Partial |
| | | | | Repression |
| NCU07593 | hypothetical protein | | | Partial |
| | | | | Repression |
| NCU07718 | hypothetical protein | | | Partial |
| | | | | Repression |
| NCU08224 | hypothetical protein | | | Partial |
| | | | | Repression |
| NCU08469 | hypothetical protein | | | Partial |
| | | | | Repression |
| NCU08726 | hypothetical protein | | | Partial |
| | | | | Repression |
| NCU09049 | hypothetical protein | | | Partial |
| | | | | Repression |
| NCU09115 | cytochrome P450 52A11 | | | Partial |
| | | | | Repression |
| NCU09883 | hypothetical protein | | | Partial |
| | | | | Repression |
| NCU10658 | hypothetical protein | | | Partial |
| | | | | Repression |
| NCU10770 | hypothetical protein | | | Partial |
| | | | | Repression |
| NCU11294 | | | | Partial |
| | | | | Repression |
| NCU00304 | hypothetical protein | | | WT |
| | | | | Induction |
| NCU00798 | hypothetical protein | | | WT |
| | | | | Induction |
| NCU01136 | hypothetical protein | | | WT |
| | | | | Induction |
| NCU01430 | hypothetical protein | | | WT |
| | | | | Induction |
| NCU03791 | hypothetical protein | | | WT |
| | | | | Induction |
| NCU04167 | hypothetical protein | | | WT |
| | | | | Induction |
| NCU04400 | hypothetical protein | | | WT |
| | | | | Induction |
| NCU04557 | hypothetical protein | | | WT |
| | | | | Induction |
| NCU04879 | hypothetical protein | | | WT |
| | | | | Induction |
| NCU04910 | hypothetical protein | | | WT |
| | | | | Induction |
| NCU04928 | hypothetical protein | | | WT |
| | | | | Induction |
| NCU05068 | hypothetical protein | | | WT |
| | | | | Induction |
| NCU05755 | hypothetical protein | | | WT |
| | | | | Induction |
| NCU05826 | hypothetical protein | | | WT |
| | | | | Induction |
| NCU05832 | hypothetical protein | | | WT |
| | | | | Induction |
| NCU05875 | hypothetical protein | | | WT |
| | | | | Induction |
| NCU05909 | hypothetical protein | | | WT |
| | | | | Induction |
| NCU06181 | hypothetical protein | | | WT |
| | | | | Induction |
| NCU06235 | hypothetical protein | | | WT |
| | | | | Induction |
| NCU06387 | hypothetical protein | | | WT |
| | | | | Induction |
| NCU07235 | hypothetical protein | | | WT |
| | | | | Induction |
| NCU07510 | hypothetical protein | | | WT |
| | | | | Induction |
| NCU07572 | hypothetical protein | | | WT |
| | | | | Induction |
| NCU07997 | hypothetical protein | | | WT |
| | | | | Induction |
| NCU08383 | hypothetical protein | | | WT |
| | | | | Induction |
| NCU08491 | hypothetical protein | | | WT |
| | | | | Induction |
| NCU08634 | hypothetical protein | | | WT |
| | | | | Induction |
| NCU09075 | hypothetical protein | | | WT |
| | | | | Induction |
| NCU09415 | hypothetical protein | | | WT |
| | | | | Induction |
| NCU09856 | hypothetical protein | | | WT |
| | | | | Induction |
| NCU09874 | hypothetical protein | | | WT |
| | | | | Induction |
| NCU09906 | hypothetical protein | | | WT |
| | | | | Induction |
| NCU10284 | | | | WT |
| | | | | Induction |
| NCU10697 | hypothetical protein | | | WT |
| | | | | Induction |
| NCU11095 | hypothetical protein | | | WT |
| | | | | Induction |
| NCU11291 | hypothetical protein | | | WT |
| | | | | Induction |
| NCU11689 | hypothetical protein | | | WT |
| | | | | Induction |
| NCU11801 | | | | WT |
| | | | | Induction |
| NCU11932 | hypothetical protein | | | WT |
| | | | | Induction |
| NCU00365 | hypothetical protein | | | WT |
| | | | | Repression |
| NCU00375 | hypothetical protein | | | WT |
| | | | | Repression |
| NCU00755 | hypothetical protein | | | WT |
| | | | | Repression |
| NCU01109 | hypothetical protein | | | WT |
| | | | | Repression |
| NCU01292 | hypothetical protein | | | WT |
| | | | | Repression |
| NCU01551 | hypothetical protein | | | WT |
| | | | | Repression |
| NCU01649 | hypothetical protein | | | WT |
| | | | | Repression |
| NCU03011 | hypothetical protein | | | WT |
| | | | | Repression |
| NCU03417 | hypothetical protein | | | WT |
| | | | | Repression |
| NCU04285 | hypothetical protein | | | WT |
| | | | | Repression |
| NCU04843 | hypothetical protein | | | WT |
| | | | | Repression |
| NCU04851 | hypothetical protein | | | WT |
| | | | | Repression |
| NCU04861 | hypothetical protein | | | WT |
| | | | | Repression |
| NCU04862 | hypothetical protein | | | WT |
| | | | | Repression |
| NCU05006 | cytochrome P450 | | | WT |
| | | | | Repression |
| NCU05189 | hypothetical protein | | | WT |
| | | | | Repression |
| NCU05197 | hypothetical protein | | | WT |
| | | | | Repression |
| NCU05477 | hypothetical protein | | | WT |
| | | | | Repression |
| NCU05762 | hypothetical protein | | | WT |
| | | | | Repression |
| NCU05764 | hypothetical protein | | | WT |
| | | | | Repression |
| NCU05766 | hypothetical protein | | | WT |
| | | | | Repression |
| NCU05859 | hypothetical protein | | | WT |
| | | | | Repression |
| NCU05933 | hypothetical protein | | | WT |
| | | | | Repression |
| NCU06334 | hypothetical protein | | | WT |
| | | | | Repression |
| NCU07180 | hypothetical protein | | | WT |
| | | | | Repression |
| NCU07363 | hypothetical protein | | | WT |
| | | | | Repression |
| NCU08037 | hypothetical protein | | | WT |
| | | | | Repression |
| NCU08155 | hypothetical protein | | | WT |
| | | | | Repression |
| NCU08156 | hypothetical protein | | | WT |
| | | | | Repression |
| NCU08170 | hypothetical protein | | | WT |
| | | | | Repression |
| NCU08455 | hypothetical protein | | | WT |
| | | | | Repression |
| NCU08554 | peptidyl-prolyl cis-trans isomerase | | | WT |
| | ssp-1 | | | Repression |
| NCU08622 | hypothetical protein | | | WT |
| | | | | Repression |
| NCU08700 | hypothetical protein | | | WT |
| | | | | Repression |
| NCU08775 | hypothetical protein | | | WT |
| | | | | Repression |
| NCU09272 | hypothetical protein | | | WT |
| | | | | Repression |
| NCU09273 | hypothetical protein | | | WT |
| | | | | Repression |
| NCU09274 | hypothetical protein | | | WT |
| | | | | Repression |
| NCU09335 | hypothetical protein | | | WT |
| | | | | Repression |
| NCU09342 | hypothetical protein | | | WT |
| | | | | Repression |
| NCU09714 | hypothetical protein | | | WT |
| | | | | Repression |
| NCU09782 | hypothetical protein | | | WT |
| | | | | Repression |
| NCU10062 | hypothetical protein | | | WT |
| | | | | Repression |
| NCU10301 | hypothetical protein | | | WT |
| | | | | Repression |
| NCU11565 | hypothetical protein | | | WT |
| | | | | Repression |
| NCU11774 | | | | WT |
| | | | | Repression |
| NCU11881 | hypothetical protein | | | WT |
| | | | | Repression |
| NCU11974 | hypothetical protein | | | WT |
| | | | | Repression |
| NCU11989 | hypothetical protein | | | WT |
| | | | | Repression |
| NCU12012 | | | | WT |
| | | | | Repression |
| NCU12014 | hypothetical protein | | | WT |
| | | | | Repression |
| NCU12015 | hypothetical protein | | | WT |
| | | | | Repression |

Annotation: Broad Institute Annotation
Group 1: Author's hand curated annotation category
Group 2: Author's hand curated annotation/function

TABLE 1B
Annotation information for genes in Table 1A

| | | | Signal P | TM | | Tian et | Tian et al. |
|---|---|---|---|---|---|---|---|
| Gene | CAZy | Signal P | Confidence | Domains | LCMS | al., MA | Annotation |
| NCU00554 | | Mitochondrion | 4 | | | | |
| NCU00944 | | Mitochondrion | 2 | | | | |
| NCU01195 | | Other | 1 | | | | |
| NCU02785 | | Other | 2 | | | | |
| NCU02954 | | Other | 2 | | | | |
| NCU03131 | | Mitochondrion | 1 | | | | |
| NCU04216 | | Other | 5 | | | | |
| NCU04298 | | Other | 2 | | | | |
| NCU04837 | | Other | 4 | | | | |
| NCU05548 | | Other | 2 | | | | |
| NCU07413 | | Other | 1 | | | | |
| NCU10283 | | Other | 5 | | | | |
| NCU00461 | | Other | 2 | | | | |
| NCU00591 | | Mitochondrion | 1 | | | | |
| NCU00680 | | Mitochondrion | 1 | | | | |
| NCU01402 | | Other | 1 | | | | |
| NCU02127 | | Mitochondrion | 2 | | | | |
| NCU02704 | | Mitochondrion | 1 | | | | |
| NCU02727 | | Mitochondrion | 2 | | | | |
| NCU02936 | | Mitochondrion | 2 | | | | |
| NCU03076 | | Mitochondrion | 1 | | | | |
| NCU03415 | | Other | 1 | | | Avi/Mis | |
| NCU03648 | | Secretory | 2 | | | | |
| | | Pathway | | | | | |
| NCU03913 | | Mitochondrion | 2 | | | | |
| NCU05499 | | Other | 2 | | | | |
| NCU05537 | | Other | 2 | | | | |
| NCU05977 | | Other | 2 | | | | |
| NCU06448 | | Mitochondrion | 1 | | | | |
| NCU06543 | | Mitochondrion | 1 | | | | |
| NCU07153 | | Mitochondrion | 2 | | | | |
| NCU08216 | | Other | 1 | | | | |
| NCU09116 | | Other | 2 | | | | |
| NCU09266 | | Mitochondrion | 1 | | | | |
| NCU09864 | | Mitochondrion | 1 | | | | |
| NCU11195 | | Mitochondrion | 3 | | | | |
| NCU01830 | | Other | 2 | | | | |
| NCU02126 | | Mitochondrion | 2 | | | | |
| NCU01744 | | Other | 1 | | | | |
| NCU03748 | | Other | 4 | | | | |
| NCU06625 | | Other | 3 | | | | |
| NCU04130 | | Other | 5 | | | | |
| NCU10110 | | Secretory | 5 | 1 | | | |
| | | Pathway | | | | | |
| NCU03861 | | Secretory | 1 | | | | |
| | | Pathway | | | | | |
| NCU07623 | | Other | 2 | | | | |
| NCU01427 | | Other | 3 | | | | |
| NCU03651 | | Mitochondrion | 3 | | | | |
| NCU02579 | | Secretory | 1 | | | | |
| | | Pathway | | | | | |
| NCU07307 | | Mitochondrion | 4 | | | | |
| NCU07308 | | Secretory | 4 | | | | |
| | | Pathway | | | | | |
| NCU05858 | | Other | 2 | | | | |
| NCU01013 | | Mitochondrion | 4 | | | | |
| NCU06189 | | Mitochondrion | 4 | | | | |
| NCU05165 | | Secretory | 1 | 1 | | | |
| | | Pathway | | | | | |
| NCU04865 | | Other | 2 | | | | |
| NCU05011 | | Other | 3 | | | | |
| NCU00762 | CBM1, | Secretory | 2 | | Avi/Mis | Avi/Mis | Cellulase |
| | GH5 | Pathway | | | | | |
| NCU00836 | CBM1, | Secretory | 4 | | | Avi/Mis | Cellulase |
| | GH61 | Pathway | | | | | |
| NCU01050 | GH61 | Secretory | 2 | | Avi/Mis | Avi/Mis | Cellulase |
| | | Pathway | | | | | |
| NCU02240 | CBM1, | Secretory | 2 | | Avi | Avi/Mis | Cellulase |
| | GH61 | Pathway | | | | | |
| NCU02344 | GH61 | Secretory | 4 | | | Avi/Mis | Cellulase |
| | | Pathway | | | | | |
| NCU02916 | CBM1, | Secretory | 3 | | | Avi/Mis | Cellulase |
| | GH61 | Pathway | | | | | |
| NCU03328 | GH61 | Secretory | 1 | | | Avi/Mis | Cellulase |
| | | Pathway | | | | | |
| NCU04854 | GH7 | Secretory | 2 | | | Avi/Mis | Cellulase |
| | | Pathway | | | | | |
| NCU05057 | GH7 | Secretory | 2 | | Avi/Mis | Avi/Mis | Cellulase |
| | | Pathway | | | | | |
| NCU05121 | CBM1, | Secretory | 2 | | Avi | Avi/Mis | Cellulase |
| | GH45 | Pathway | | | | | |
| NCU07190 | GH6 | Secretory | 3 | | Avi/Mis | Avi/Mis | Cellulase |
| | | Pathway | | | | | |
| NCU07340 | CBM1, | Secretory | 2 | | Avi/Mis | Avi/Mis | Cellulase |
| | GH7 | Pathway | | | | | |
| NCU07760 | CBM1, | Secretory | 2 | | | Mis | Cellulase |
| | GH61 | Pathway | | | | | |
| NCU07898 | GH61 | Secretory | 1 | | Avi/Mis | Avi/Mis | Cellulase |
| | | Pathway | | | | | |
| NCU08760 | CBM1, | Secretory | 1 | | Avi/Mis | Avi/Mis | Cellulase |
| | GH61 | Pathway | | | | | |
| NCU09680 | CBM1, | Secretory | 1 | | Avi/Mis | Avi/Mis | Cellulase |
| | GH6 | Pathway | | | | | |
| NCU03322 | | Other | 1 | | | | |
| NCU07362 | | Other | 2 | | | | |
| NCU03813 | | Other | 2 | | | | |
| NCU04539 | | Other | 3 | | | | |
| NCU08687 | | Other | 2 | | | | |
| NCU05133 | | Other | 2 | | | | |
| NCU09705 | | Secretory | 3 | | | Avi/Mis | |
| | | Pathway | | | | | |
| NCU07277 | | Secretory | 1 | | | Avi | |
| | | Pathway | | | | | |
| NCU04797 | | Other | 2 | | | | |
| NCU00575 | | Other | 1 | | | | |
| NCU04401 | | Other | 4 | | | Mis | |
| NCU02855 | GH11 | Secretory | 3 | | Avi | Avi/Mis | Hemicellulase |
| | | Pathway | | | | | |
| NCU05924 | GH10 | Secretory | 2 | | Avi/Mis | Avi/Mis | Hemicellulase |
| | | Pathway | | | | | |
| NCU05955 | CBM1, | Secretory | 2 | | Avi/Mis | Avi/Mis | Hemicellulase |
| | GH74 | Pathway | | | | | |
| NCU07326 | GH43 | Secretory | 1 | | Avi/Mis | Avi/Mis | Hemicellulase |
| | | Pathway | | | | | |
| NCU09775 | GH54 | Secretory | 1 | | Mis | Mis | Hemicellulase |
| | | Pathway | | | | | |
| NCU04997 | CBM1, | Secretory | 2 | | | | Hemicellulase |
| | GH10 | Pathway | | | | | |
| NCU01900 | GH43 | Other | 2 | | | Avi/Mis | Hemicellulase |
| NCU02343 | GH51 | Secretory | 1 | | Mis | Avi/Mis | Hemicellulase |
| | | Pathway | | | | | |
| NCU07225 | CBM1, | Secretory | 2 | | Avi/Mis | Avi/Mis | Hemicellulase |
| | GH11 | Pathway | | | | | |
| NCU08087 | GH26 | Other | 2 | | | | Hemicellulase |
| NCU08189 | GH10 | Secretory | 1 | | Avi/Mis | Avi/Mis | Hemicellulase |
| | | Pathway | | | | | |
| NCU09652 | GH43 | Other | 2 | | | Avi/Mis | Hemicellulase |
| NCU06881 | | Mitochondrion | 2 | | | | |
| NCU01853 | | Other | 2 | | | | |
| NCU02287 | | Other | 2 | | | | |
| NCU02894 | | Other | 3 | | | | |
| NCU07263 | | Other | 3 | 2 | | | |
| NCU08924 | | Other | 2 | | | | |
| NCU09692 | | Mitochondrion | 5 | 6 | | | |
| NCU04796 | | Other | 2 | | | | |
| NCU09732 | | Mitochondrion | 1 | | | | |
| NCU07719 | | Other | 2 | | | | |
| NCU12093 | | Other | 2 | | | | |
| NCU05818 | | Other | 3 | | | | |
| NCU04078 | | Mitochondrion | 2 | | | | |
| NCU07617 | | Other | 2 | | | | |
| NCU08398 | | Secretory | 4 | | Avi/Mis | Avi/Mis | |
| | | Pathway | | | | | |
| NCU10683 | | Other | 2 | | | | |
| NCU10063 | | Other | 2 | | | | |
| NCU04933 | | Secretory | 5 | | | | |
| | | Pathway | | | | | |
| NCU00890 | GH2 | Other | 3 | | | Avi | |
| NCU04623 | GH35 | Secretory | 4 | | | | |
| | | Pathway | | | | | |
| NCU04952 | GH3 | Secretory | 2 | | Avi/Mis | Avi | |
| | | Pathway | | | | | |
| NCU05956 | GH2 | Other | 4 | | | | |
| NCU07487 | GH3 | Other | 2 | | | Avi/Mis | |
| NCU08755 | GH3 | Secretory | 2 | | | Avi/Mis | |
| | | Pathway | | | | | |
| NCU00130 | GH1 | Other | 4 | | | Avi/Mis | |
| NCU00709 | GH3 | Secretory | 1 | | | | |
| | | Pathway | | | | | |
| NCU04168 | GH16 | Other | 2 | 1 | | | |
| NCU09904 | GH16 | Other | 1 | 1 | | Avi | |
| NCU09923 | GH3 | Secretory | 1 | | Mis | Mis | |
| | | Pathway | | | | | |
| NCU03098 | GH15 | Other | 4 | | | | |
| NCU09028 | GH47 | Mitochondrion | 3 | 1 | | | |
| NCU09281 | GH31 | Secretory | 1 | | | | |
| | | Pathway | | | | | |
| NCU10107 | | Other | 2 | | | | |
| NCU00206 | CBM1 | Secretory | 3 | | Avi/Mis | Avi/Mis | |
| | | Pathway | | | | | |
| NCU00710 | CBM1, | Secretory | 2 | | | Mis | |
| | CE1 | Pathway | | | | | |
| NCU01059 | GH47 | Secretory | 3 | 1 | | | |
| | | Pathway | | | | | |
| NCU03181 | | Secretory | 3 | | | Avi/Mis | |
| | | Pathway | | | | | |
| NCU04494 | CE1 | Secretory | 1 | | | Mis | |
| | | Pathway | | | | | |
| NCU05598 | PL4 | Secretory | 1 | 1 | | Avi/Mis | |
| | | Pathway | | | | | |
| NCU05751 | CE3 | Secretory | 1 | | Mis | Mis | |
| | | Pathway | | | | | |
| NCU08176 | PL3 | Secretory | 2 | | | Avi/Mis | |
| | | Pathway | | | | | |
| NCU08746 | CBM20 | Secretory | 3 | | | Avi/Mis | |
| | | Pathway | | | | | |
| NCU08785 | CE1 | Secretory | 1 | | Mis | Avi/Mis | |
| | | Pathway | | | | | |
| NCU09445 | CE15 | Secretory | 1 | | | | |
| | | Pathway | | | | | |
| NCU09491 | CE1 | Secretory | 2 | | Avi/Mis | Mis | |
| | | Pathway | | | | | |
| NCU09582 | CE4 | Secretory | 1 | | | Avi/Mis | |
| | | Pathway | | | | | |
| NCU09764 | CBM1 | Secretory | 1 | | | Avi/Mis | |
| | | Pathway | | | | | |
| NCU09774 | CE1 | Secretory | 1 | | | Avi | |
| | | Pathway | | | | | |
| NCU09976 | CE12 | Secretory | 4 | | | Mis | |
| | | Pathway | | | | | |
| NCU10045 | CE8 | Secretory | 1 | | | Avi/Mis | |
| | | Pathway | | | | | |
| NCU11068 | | Other | 3 | | | | |
| NCU11198 | GH53 | Secretory | 1 | | | | |
| | | Pathway | | | | | |
| NCU02904 | | Secretory | 1 | | | | |
| | | Pathway | | | | | |
| NCU04870 | CE1 | Secretory | 1 | | Mis | Mis | |
| | | Pathway | | | | | |
| NCU05159 | CBM1, | Secretory | 1 | | Mis | Avi/Mis | |
| | CE5 | Pathway | | | | | |
| NCU09518 | | Secretory | 1 | | | | |
| | | Pathway | | | | | |
| NCU09664 | CE5 | Secretory | 1 | | | Avi/Mis | |
| | | Pathway | | | | | |
| NCU09924 | GH93 | Secretory | 1 | | | Mis | |
| | | Pathway | | | | | |
| NCU03158 | | Secretory | 4 | 1 | | | |
| | | Pathway | | | | | |
| NCU07067 | GH47 | Secretory | 1 | 3 | | | |
| | | Pathway | | | | | |
| NCU01353 | GH16 | Secretory | 3 | | | | |
| | | Pathway | | | | | |
| NCU07269 | GH92 | Secretory | 2 | | | | |
| | | Pathway | | | | | |
| NCU06023 | | Other | 3 | | | | |
| NCU06025 | | Other | 4 | | | | |
| NCU00761 | | Secretory | 1 | | | | |
| | | Pathway | | | | | |
| NCU06650 | | Secretory | 1 | | | | |
| | | Pathway | | | | | |
| NCU09416 | CBM1, | Secretory | 1 | | | Avi | |
| | CE16 | Pathway | | | | | |
| NCU00292 | | Secretory | 2 | | | | |
| | | Pathway | | | | | |
| NCU03903 | | Secretory | 2 | | | | |
| | | Pathway | | | | | |
| NCU04475 | | Secretory | 1 | | | Mis | |
| | | Pathway | | | | | |
| NCU06364 | | Secretory | 2 | | | | |
| | | Pathway | | | | | |
| NCU09575 | | Secretory | 3 | | | | |
| | | Pathway | | | | | |
| NCU04230 | | Other | 1 | | | | |
| NCU02366 | | Mitochondrion | 2 | | | | |
| NCU04280 | | Mitochondrion | 2 | | | | |
| NCU04385 | | Other | 2 | | | | |
| NCU02969 | | Other | 3 | 6 | | | |
| NCU08164 | | Other | 2 | | | | |
| NCU00891 | | Other | 2 | | | Mis | |
| NCU08384 | | Other | 2 | | | Avi/Mis | |
| NCU08272 | | Other | 1 | | | | |
| NCU07619 | | Secretory | 2 | | | | |
| | | Pathway | | | | | |
| NCU05304 | | Other | 2 | | | | |
| NCU01510 | | Other | 1 | 1 | | | |
| NCU05768 | | Secretory | 1 | | | | |
| | | Pathway | | | | | |
| NCU07154 | | Other | 3 | | | | |
| NCU01998 | | Mitochondrion | 4 | | | | |
| NCU08457 | | Secretory | 1 | | | | |
| | | Pathway | | | | | |
| NCU06386 | GT2 | Secretory | 2 | 1 | | | |
| | | Pathway | | | | | |
| NCU09425 | GH94 | Other | 5 | | | | |
| NCU02478 | GT5, | Secretory | 2 | 13 | | | |
| | GH13 | Pathway | | | | | |
| NCU09175 | GH17 | Secretory | 3 | | Avi/Mis | Avi/Mis | |
| | | Pathway | | | | | |
| NCU01689 | | Other | 3 | | | | |
| NCU11721 | | Mitochondrion | 5 | | | | |
| NCU02396 | | Other | 2 | | | | |
| NCU07481 | | Other | 2 | | | | |
| NCU03137 | | Other | 2 | | | | |
| NCU02500 | | Secretory | 2 | | | Avi | |
| | | Pathway | | | | | |
| NCU00565 | | Mitochondrion | 1 | | | | |
| NCU02705 | | Mitochondrion | 1 | | | | |
| NCU05225 | | Mitochondrion | 2 | 1 | | | |
| NCU08326 | | Other | 2 | | | | |
| NCU00326 | | Other | 1 | | | Avi/Mis | |
| NCU08691 | | Other | 3 | | | | |
| NCU09043 | | Other | 1 | 1 | | | |
| NCU07432 | | Secretory | 1 | 4 | | | |
| | | Pathway | | | | | |
| NCU05841 | | Other | 2 | | | | |
| NCU02361 | | Other | 1 | | | | |
| NCU10051 | | Other | 4 | | | | |
| NCU04720 | | Other | 3 | | | | |
| NCU04698 | | Other | 2 | 1 | | | |
| NCU00177 | | Mitochondrion | 5 | | | | |
| NCU01786 | | Other | 2 | | | | |
| NCU03117 | | Other | 2 | | | | |
| NCU05254 | | Other | 2 | | | | |
| NCU03963 | | Other | 2 | | | | |
| NCU09659 | | Secretory | 2 | | | | |
| | | Pathway | | | | | |
| NCU03488 | | Other | 3 | | | | |
| NCU02657 | | Other | 2 | | | | |
| NCU05855 | | Other | 5 | | | Avi | |
| NCU08044 | | Mitochondrion | 2 | | | | |
| NCU09283 | | Other | 2 | | | | |
| NCU11243 | | Other | 3 | | | | |
| NCU01378 | | Other | 4 | | | | |
| NCU01861 | | Mitochondrion | 1 | | | | |
| NCU04583 | | Mitochondrion | 4 | | | | |
| NCU06616 | | Mitochondrion | 2 | | | | |
| NCU07325 | | Other | 1 | | | Avi | |
| NCU08771 | | Other | 4 | | | | |
| NCU09553 | | Mitochondrion | 2 | | | | |
| NCU10055 | | Other | 3 | 7 | | | |
| NCU11289 | | Other | 3 | | | | |
| NCU08750 | | Secretory | 1 | | | Avi/Mis | |
| | | Pathway | | | | | |
| NCU08752 | | Secretory | 1 | | | | |
| | | Pathway | | | | | |
| NCU03049 | | Other | 2 | | | | |
| NCU05653 | | Secretory | 4 | | | | |
| | | Pathway | | | | | |
| NCU07133 | | Other | 3 | | | | |
| NCU08925 | | Other | 3 | | | | |
| NCU09865 | | Other | 2 | | | | |
| NCU11365 | | Other | 2 | | | | |
| NCU07055 | | Secretory | 3 | | | | |
| | | Pathway | | | | | |
| NCU07224 | | Secretory | 2 | | | | |
| | | Pathway | | | | | |
| NCU01061 | | Other | 4 | | | | |
| NCU03566 | | Other | 4 | | | | |
| NCU04260 | | Other | 3 | | | | |
| NCU05094 | | Other | 4 | 1 | | | |
| NCU05986 | | Other | 3 | | | | |
| NCU06153 | | Other | 2 | 1 | | | |
| NCU09674 | | Other | 1 | | | | |
| NCU11241 | | Other | 1 | | | | |
| NCU03013 | | Secretory | 3 | | | Mis | |
| | | Pathway | | | | | |
| NCU05319 | | Other | 3 | | | Avi/Mis | |
| NCU04430 | | Secretory | 2 | | | | |
| | | Pathway | | | | | |
| NCU02059 | | Secretory | 2 | | | Mis | |
| | | Pathway | | | | | |
| NCU00831 | | Secretory | 3 | | | | |
| | | Pathway | | | | | |
| NCU06055 | | Secretory | 2 | | | | |
| | | Pathway | | | | | |
| NCU00263 | | Secretory | 2 | | | Mis | |
| | | Pathway | | | | | |
| NCU07200 | | Secretory | 1 | | | | |
| | | Pathway | | | | | |
| NCU09992 | | Secretory | 3 | | | Mis | |
| | | Pathway | | | | | |
| NCU09265 | | Secretory | 4 | 1 | | Mis | |
| | | Pathway | | | | | |
| NCU00813 | | Secretory | 2 | | | Avi/Mis | |
| | | Pathway | | | | | |
| NCU02455 | | Secretory | 1 | | | Mis | |
| | | Pathway | | | | | |
| NCU09223 | | Secretory | 2 | | | Avi/Mis | |
| | | Pathway | | | | | |
| NCU09485 | | Secretory | 1 | 1 | | Mis | |
| | | Pathway | | | | | |
| NCU01648 | GT39 | Other | 2 | 9 | | | |
| NCU10497 | | Other | 3 | 13 | | | |
| NCU00669 | | Secretory | 1 | 1 | | | |
| | | Pathway | | | | | |
| NCU02118 | | Secretory | 3 | 4 | | | |
| | | Pathway | | | | | |
| NCU10762 | | Secretory | 5 | 1 | | | |
| | | Pathway | | | | | |
| NCU00244 | GT8 | Other | 3 | | | | |
| NCU01068 | | Other | 2 | | | | |
| NCU03319 | | Other | 5 | 6 | | Mis | |
| NCU08761 | | Secretory | 2 | | | | |
| | | Pathway | | | | | |
| NCU01279 | | Secretory | 1 | 1 | | | |
| | | Pathway | | | | | |
| NCU03819 | | Other | 2 | | | | |
| NCU08607 | | Other | 4 | 2 | | Mis | |
| NCU09195 | | Other | 5 | 7 | | | |
| NCU07736 | | Other | 2 | 14 | | | |
| NCU01290 | | Other | 2 | | | | |
| NCU03396 | | Other | 2 | | | | |
| NCU09521 | | Other | 1 | | | | |
| NCU03897 | | Other | 1 | | | | |
| NCU07746 | | Other | 1 | | | | |
| NCU08897 | | Secretory | 4 | 8 | | | |
| | | Pathway | | | | | |
| NCU00169 | | Other | 3 | 3 | | | |
| NCU02681 | | Secretory | 1 | 1 | | | |
| | | Pathway | | | | | |
| NCU06333 | | Other | 2 | 2 | | Mis | |
| NCU01146 | | Secretory | 1 | 1 | | | |
| | | Pathway | | | | | |
| NCU00931 | | Other | 3 | | | | |
| NCU07008 | | Other | 1 | | | | |
| NCU03295 | | Other | 2 | | | | |
| NCU07737 | | Other | 3 | | | Avi/Mis | |
| NCU08038 | | Secretory | 1 | 1 | | Mis | |
| | | Pathway | | | | | |
| NCU02729 | | Other | 5 | | | | |
| NCU03364 | | Mitochondrion | 4 | | | | |
| NCU03817 | | Mitochondrion | 1 | | | | |
| NCU06111 | | Mitochondrion | 5 | | | | |
| NCU08115 | | Mitochondrion | 5 | | | | |
| NCU06931 | | Mitochondrion | 2 | | | | |
| NCU04077 | | Other | 3 | | | | |
| NCU01862 | | Other | 2 | | | | |
| NCU02795 | | Other | 2 | | | | |
| NCU00812 | | Mitochondrion | 4 | | | | |
| NCU01856 | | Other | 1 | | | | |
| NCU03725 | | Other | 2 | | | | |
| NCU06971 | | Mitochondrion | 5 | | | | |
| NCU07705 | | Other | 4 | | | Avi/Mis | |
| NCU08042 | | Other | 3 | | | | |
| NCU03643 | | Other | 1 | | | | |
| NCU03043 | | Other | 3 | | | | |
| NCU05767 | | Other | 3 | | | | |
| NCU00316 | | Other | 4 | 2 | | | |
| NCU00721 | | Other | 2 | 12 | | | |
| NCU07578 | | Other | 5 | | | | |
| NCU04435 | | Other | 1 | 12 | | | |
| NCU05198 | | Other | 1 | 11 | | | |
| NCU10721 | | Other | 4 | 8 | | | |
| NCU11342 | | Other | 2 | | | | |
| NCU00821 | | Secretory | 2 | 1 | | | |
| | | Pathway | | | | | |
| NCU08561 | | Other | 2 | | | | |
| NCU09287 | | Other | 1 | 11 | | | |
| NCU00801 | | Other | 1 | 12 | | Avi/Mis | |
| NCU00809 | | Other | 1 | 12 | | | |
| NCU07668 | | Other | 5 | | | | |
| NCU05089 | | Other | 2 | 12 | | | |
| NCU08152 | | Secretory | 1 | 12 | | | |
| | | Pathway | | | | | |
| NCU01633 | | Other | 2 | 12 | | | |
| NCU04537 | | Other | 1 | 12 | | | |
| NCU05853 | | Other | 2 | 11 | | Avi/Mis | |
| NCU08114 | | Other | 2 | 9 | | Avi/Mis | |
| NCU00023 | | Mitochondrion | 4 | 6 | | | |
| NCU02009 | | Other | 3 | 5 | | | |
| NCU07068 | | Secretory | 4 | 12 | | | |
| | | Pathway | | | | | |
| NCU03305 | | Other | 3 | 9 | | | |
| NCU08225 | | Secretory | 2 | 7 | | | |
| | | Pathway | | | | | |
| NCU08147 | | Other | 1 | 1 | | | |
| NCU06366 | | Other | 3 | | | | |
| NCU05585 | | Other | 3 | 1 | | Mis | |
| NCU06138 | | Other | 5 | 11 | | Avi/Mis | |
| NCU05591 | | Other | 4 | 13 | | | |
| NCU06032 | | Secretory | 2 | | | | |
| | | Pathway | | | | | |
| NCU09098 | | Secretory | 1 | 12 | | | |
| | | Pathway | | | | | |
| NCU10009 | | Other | 2 | 13 | | | |
| NCU00290 | | Other | 2 | 6 | | Avi | |
| NCU09580 | | Other | 1 | | | | |
| NCU00803 | | Other | 3 | 12 | | | |
| NCU04374 | | Other | 1 | 12 | | | |
| NCU08425 | | Secretory | 2 | 1 | | | |
| | | Pathway | | | | | |
| NCU04097 | | Other | 2 | | | | |
| NCU05079 | | Other | 1 | 11 | | | |
| NCU07546 | | Other | 1 | 12 | | Avi | |
| NCU08148 | | Other | 1 | | | | |
| NCU03107 | | Other | 3 | 1 | | | |
| NCU00586 | | Secretory | 1 | 4 | | | |
| | | Pathway | | | | | |
| NCU00716 | | Secretory | 1 | | | | |
| | | Pathway | | | | | |
| NCU00025 | | Secretory | 1 | 9 | | | |
| | | Pathway | | | | | |
| NCU00848 | | Other | 1 | 6 | | | |
| NCU00449 | | Secretory | 1 | | | | |
| | | Pathway | | | | | |
| NCU00849 | | Secretory | 3 | | | | |
| | | Pathway | | | | | |
| NCU01058 | | Secretory | 4 | | | | |
| | | Pathway | | | | | |
| NCU01076 | | Secretory | 1 | 1 | | Avi | |
| | | Pathway | | | | | |
| NCU01196 | | Secretory | 1 | | | | |
| | | Pathway | | | | | |
| NCU01978 | | Secretory | 1 | 8 | | | |
| | | Pathway | | | | | |
| NCU02138 | | Secretory | 1 | 1 | | | |
| | | Pathway | | | | | |
| NCU03083 | | Secretory | 2 | | | | |
| | | Pathway | | | | | |
| NCU03982 | | Secretory | 1 | 1 | | Avi/Mis | |
| | | Pathway | | | | | |
| NCU04948 | | Secretory | 1 | | | | |
| | | Pathway | | | | | |
| NCU05230 | | Secretory | 1 | 4 | | | |
| | | Pathway | | | | | |
| NCU05863 | | Secretory | 5 | | | | |
| | | Pathway | | | | | |
| NCU05864 | | Secretory | 2 | | | Avi/Mis | |
| | | Pathway | | | | | |
| NCU06152 | | Secretory | 2 | 1 | | | |
| | | Pathway | | | | | |
| NCU06607 | | Secretory | 2 | | | Avi | |
| | | Pathway | | | | | |
| NCU08756 | | Secretory | 2 | | | | |
| | | Pathway | | | | | |
| NCU08790 | | Secretory | 1 | | | | |
| | | Pathway | | | | | |
| NCU09295 | | Secretory | 1 | 1 | | | |
| | | Pathway | | | | | |
| NCU09524 | | Secretory | 5 | | | Avi/Mis | |
| | | Pathway | | | | | |
| NCU11268 | | Secretory | 4 | | | | |
| | | Pathway | | | | | |
| NCU11542 | | Secretory | 1 | | | | |
| | | Pathway | | | | | |
| NCU11753 | | Secretory | 2 | | | | |
| | | Pathway | | | | | |
| NCU00175 | | Secretory | 3 | | | | |
| | | Pathway | | | | | |
| NCU00250 | | Secretory | 1 | 2 | | | |
| | | Pathway | | | | | |
| NCU00322 | | Secretory | 2 | | | | |
| | | Pathway | | | | | |
| NCU00695 | | Secretory | 3 | | | Avi | |
| | | Pathway | | | | | |
| NCU07311 | | Secretory | 1 | 4 | | | |
| | | Pathway | | | | | |
| NCU08171 | | Secretory | 2 | | | | |
| | | Pathway | | | | | |
| NCU08521 | | Secretory | 1 | 2 | | | |
| | | Pathway | | | | | |
| NCU10507 | | Secretory | 1 | | | | |
| | | Pathway | | | | | |
| NCU07143 | | Secretory | 1 | | Avi/Mis | Avi/Mis | |
| | | Pathway | | | | | |
| NCU07222 | | Secretory | 1 | | | | |
| | | Pathway | | | | | |
| NCU08371 | | Secretory | 2 | 1 | | Mis | |
| | | Pathway | | | | | |
| NCU09506 | | Secretory | 1 | | | | |
| | | Pathway | | | | | |
| NCU04106 | | Secretory | 5 | 6 | | | |
| | | Pathway | | | | | |
| NCU06526 | | Secretory | 3 | 1 | | | |
| | | Pathway | | | | | |
| NCU09196 | | Secretory | 2 | | | | |
| | | Pathway | | | | | |
| NCU11466 | | Secretory | 4 | | | | |
| | | Pathway | | | | | |
| NCU11957 | | Secretory | 5 | | | | |
| | | Pathway | | | | | |
| NCU00995 | | Secretory | 4 | | | | |
| | | Pathway | | | | | |
| NCU01720 | | Secretory | 2 | | | | |
| | | Pathway | | | | | |
| NCU03293 | | Secretory | 1 | | | | |
| | | Pathway | | | | | |
| NCU04169 | | Secretory | 1 | | | Avi | |
| | | Pathway | | | | | |
| NCU04170 | | Secretory | 2 | | | | |
| | | Pathway | | | | | |
| NCU04467 | | Secretory | 1 | | | | |
| | | Pathway | | | | | |
| NCU04932 | | Secretory | 2 | | | | |
| | | Pathway | | | | | |
| NCU04998 | | Secretory | 1 | | | | |
| | | Pathway | | | | | |
| NCU05134 | | Secretory | 1 | | Avi | Avi/Mis | |
| | | Pathway | | | | | |
| NCU05350 | | Secretory | 1 | 4 | | | |
| | | Pathway | | | | | |
| NCU05829 | | Secretory | 3 | 7 | | | |
| | | Pathway | | | | | |
| NCU05852 | | Secretory | 1 | | | | |
| | | Pathway | | | | | |
| NCU05908 | | Secretory | 2 | | | | |
| | | Pathway | | | | | |
| NCU06143 | | Secretory | 2 | | | Avi/Mis | |
| | | Pathway | | | | | |
| NCU06983 | | Secretory | 2 | | | | |
| | | Pathway | | | | | |
| NCU06991 | | Secretory | 1 | 3 | | | |
| | | Pathway | | | | | |
| NCU08635 | | Secretory | 4 | | | | |
| | | Pathway | | | | | |
| NCU09046 | | Secretory | 1 | | | | |
| | | Pathway | | | | | |
| NCU09172 | | Secretory | 5 | 12 | | | |
| | | Pathway | | | | | |
| NCU09424 | | Secretory | 1 | | | | |
| | | Pathway | | | | | |
| NCU09498 | | Secretory | 3 | | | Avi | |
| | | Pathway | | | | | |
| NCU09823 | | Secretory | 1 | 7 | | | |
| | | Pathway | | | | | |
| NCU09848 | | Secretory | 2 | | | | |
| | | Pathway | | | | | |
| NCU10014 | | Secretory | 2 | | | Avi/Mis | |
| | | Pathway | | | | | |
| NCU10039 | | Secretory | 3 | 1 | | | |
| | | Pathway | | | | | |
| NCU10687 | | Secretory | 2 | | | | |
| | | Pathway | | | | | |
| NCU00561 | | Secretory | 2 | 1 | | | |
| | | Pathway | | | | | |
| NCU00859 | | Secretory | 1 | | | | |
| | | Pathway | | | | | |
| NCU02042 | | Secretory | 1 | 1 | | | |
| | | Pathway | | | | | |
| NCU02164 | | Secretory | 1 | 1 | | | |
| | | Pathway | | | | | |
| NCU04482 | | Secretory | 1 | | | Avi | |
| | | Pathway | | | | | |
| NCU04486 | | Secretory | 1 | 3 | | | |
| | | Pathway | | | | | |
| NCU05236 | | Secretory | 5 | 1 | | | |
| | | Pathway | | | | | |
| NCU05761 | | Secretory | 5 | | | | |
| | | Pathway | | | | | |
| NCU05763 | | Secretory | 1 | 1 | | | |
| | | Pathway | | | | | |
| NCU06328 | | Secretory | 1 | 6 | | | |
| | | Pathway | | | | | |
| NCU07948 | | Secretory | 1 | | | | |
| | | Pathway | | | | | |
| NCU08140 | | Secretory | 2 | | | | |
| | | Pathway | | | | | |
| NCU08447 | | Secretory | 1 | 7 | | | |
| | | Pathway | | | | | |
| NCU09734 | | Secretory | 2 | 1 | | | |
| | | Pathway | | | | | |
| NCU12011 | | Secretory | 1 | | | | |
| | | Pathway | | | | | |
| NCU00408 | | Other | 1 | | | | |
| NCU00633 | | Other | 2 | | | | |
| NCU00870 | | Other | 4 | | | Avi/Mis | |
| NCU00871 | | Other | 2 | | | | |
| NCU00965 | | Other | 2 | 2 | | | |
| NCU01003 | | Other | 3 | | | | |
| NCU01049 | | Other | 3 | | | | |
| NCU01077 | | Other | 1 | | | | |
| NCU01148 | | Other | 2 | | | | |
| NCU01944 | | Other | 4 | | | | |
| NCU01970 | | Other | 3 | | | Avi/Mis | |
| NCU01983 | | Mitochondrion | 2 | | | | |
| NCU02008 | | Mitochondrion | 3 | | | | |
| NCU02061 | | Mitochondrion | 2 | | | | |
| NCU02600 | | Mitochondrion | 4 | | | | |
| NCU02625 | | Mitochondrion | 5 | 1 | | | |
| NCU02720 | | Other | 4 | | | | |
| NCU02915 | | Other | 3 | | | | |
| NCU03152 | | Other | 2 | | | | |
| NCU03329 | | Other | 2 | | | | |
| NCU03433 | | Other | 3 | | | | |
| NCU04127 | | Other | 1 | 1 | | | |
| NCU04522 | | Other | 3 | | | | |
| NCU04830 | | Other | 2 | | | | |
| NCU04905 | | Other | 1 | | | Avi/Mis | |
| NCU05056 | | Other | 2 | | | | |
| NCU05170 | | Other | 2 | 1 | | | |
| NCU05569 | | Other | 4 | | | | |
| NCU05574 | | Other | 3 | | | | |
| NCU05846 | | Mitochondrion | 5 | | | Avi/Mis | |
| NCU05848 | | Secretory | 2 | 1 | | | |
| | | Pathway | | | | | |
| NCU05854 | | Other | 4 | 7 | | | |
| NCU06214 | | Other | 4 | | | | |
| NCU06312 | | Other | 3 | 7 | | | |
| NCU06704 | | Other | 5 | 1 | | | |
| NCU07207 | | Other | 2 | | | | |
| NCU07336 | | Other | 4 | | | | |
| NCU07339 | | Other | 4 | 1 | | | |
| NCU07453 | | Other | 2 | | | | |
| NCU07897 | | Other | 1 | | | | |
| NCU07979 | | Other | 4 | | | | |
| NCU08043 | | Other | 3 | | | | |
| NCU08113 | | Other | 2 | | | | |
| NCU08117 | | Other | 4 | | | | |
| NCU08379 | | Mitochondrion | 4 | 1 | | | |
| NCU08624 | | Other | 3 | 6 | | | |
| NCU08784 | | Other | 3 | | | | |
| NCU09003 | | Other | 5 | | | | |
| NCU09426 | | Other | 4 | | | | |
| NCU09479 | | Other | 3 | 1 | | | |
| NCU09522 | | Other | 5 | | | | |
| NCU09523 | | Other | 4 | | | | |
| NCU09689 | | Other | 1 | | | Avi/Mis | |
| NCU10521 | | Other | 5 | | | | |
| NCU11118 | | Mitochondrion | 3 | | | | |
| NCU11278 | | Other | 3 | | | | |
| NCU11327 | | | | | | | |
| NCU11397 | | | | | | | |
| NCU11690 | | Other | 3 | | | | |
| NCU11722 | | | | | | | |
| NCU11862 | | Other | 1 | | | | |
| NCU00247 | | Mitochondrion | 5 | 1 | | | |
| NCU01347 | | Mitochondrion | 5 | | | | |
| NCU01598 | | Other | 2 | | | | |
| NCU03761 | | Other | 3 | | | | |
| NCU04635 | | Other | 1 | | | Mis | |
| NCU04667 | | Other | 2 | | | | |
| NCU05058 | | Other | 1 | | | | |
| NCU05128 | | Other | 3 | | | | |
| NCU06265 | | Other | 2 | | | | |
| NCU06615 | | Mitochondrion | 3 | | | Avi | |
| NCU06895 | | Secretory | 1 | 1 | | | |
| | | Pathway | | | | | |
| NCU07233 | | Other | 4 | 1 | | | |
| NCU07423 | | Mitochondrion | 1 | | | | |
| NCU07424 | | Other | 5 | | | | |
| NCU07895 | | Other | 5 | | | | |
| NCU08418 | | Mitochondrion | 5 | | | | |
| NCU08557 | | Other | 1 | | | | |
| NCU08712 | | Mitochondrion | 2 | | | | |
| NCU09060 | | Other | 2 | | | | |
| NCU09231 | | Other | 3 | 4 | | | |
| NCU09685 | | Mitochondrion | 5 | 1 | | | |
| NCU09958 | | Other | 4 | | | | |
| NCU10276 | | Other | 2 | 11 | | | |
| NCU11697 | | | | | | | |
| NCU11944 | | | | | | | |
| NCU12051 | | Mitochondrion | 4 | | | | |
| NCU12128 | | | | | | | |
| NCU12145 | | Other | 2 | | | | |
| NCU00289 | | Other | 2 | | | | |
| NCU00496 | | Other | 3 | | | | |
| NCU00763 | | Other | 2 | | | | |
| NCU01386 | | Other | 1 | | | | |
| NCU02485 | | Other | 2 | | | Mis | |
| NCU02882 | | Other | 3 | | | | |
| NCU04618 | | Other | 2 | | | | |
| NCU04871 | | Mitochondrion | 5 | | | | |
| NCU04904 | | Other | 3 | | | | |
| NCU05351 | | Mitochondrion | 4 | | | | |
| NCU05501 | | Other | 2 | | | Mis | |
| NCU05906 | | Other | 2 | | | | |
| NCU06373 | | Mitochondrion | 5 | | | | |
| NCU07270 | | Other | 2 | | | | |
| NCU08116 | | Other | 5 | | | | |
| NCU08397 | | Other | 1 | 11 | | Avi/Mis | |
| NCU08748 | | Other | 1 | 11 | | | |
| NCU08867 | | Other | 5 | 1 | | | |
| NCU09176 | | Other | 3 | | | | |
| NCU11769 | | | | | | | |
| NCU11828 | | | | | | | |
| NCU11905 | | | | | | | |
| NCU00011 | | Mitochondrion | 3 | | | | |
| NCU00397 | | Other | 4 | | | | |
| NCU00510 | | Mitochondrion | 4 | | | | |
| NCU00935 | | Other | 1 | | | | |
| NCU01880 | | Other | 3 | | | | |
| NCU02080 | | Mitochondrion | 4 | | | | |
| NCU02130 | | Other | 4 | | | | |
| NCU02163 | | Other | 4 | | | | |
| NCU02365 | | Other | 2 | | | | |
| NCU03157 | | Mitochondrion | 5 | | | | |
| NCU03352 | | Other | 1 | | | | |
| NCU03398 | | Other | 3 | | | | |
| NCU03570 | | Mitochondrion | 5 | | | | |
| NCU04282 | | Other | 2 | | | | |
| NCU04342 | | Other | 2 | | | | |
| NCU04360 | | Other | 2 | | | | |
| NCU04525 | | Other | 2 | | | | |
| NCU04866 | | Other | 4 | | | | |
| NCU05784 | | Other | 1 | | | | |
| NCU05951 | | Other | 4 | 1 | | | |
| NCU05976 | | Other | 4 | | | | |
| NCU06156 | | Other | 1 | | | | |
| NCU06986 | | Other | 4 | 11 | | | |
| NCU07126 | | Other | 1 | | | | |
| NCU07593 | | Other | 5 | | | | |
| NCU07718 | | Other | 2 | | | | |
| NCU08224 | | Mitochondrion | 4 | | | Mis | |
| NCU08469 | | Other | 3 | | | | |
| NCU08726 | | Other | 2 | | | | |
| NCU09049 | | Mitochondrion | 5 | 4 | | | |
| NCU09115 | | Other | 3 | 1 | | | |
| NCU09883 | | Mitochondrion | 5 | 7 | | Avi | |
| NCU10658 | | Other | 2 | | | | |
| NCU10770 | | Other | 2 | | | | |
| NCU11294 | | | | | | | |
| NCU00304 | | Mitochondrion | 3 | | | Mis | |
| NCU00798 | | Mitochondrion | 5 | | Avi | Avi | |
| NCU01136 | | Other | 5 | | | | |
| NCU01430 | | Other | 2 | | | Mis | |
| NCU03791 | | Mitochondrion | 2 | | | | |
| NCU04167 | | Other | 2 | 7 | | | |
| NCU04400 | | Other | 5 | | | Mis | |
| NCU04557 | | Mitochondrion | 2 | | | | |
| NCU04879 | | Other | 5 | | | | |
| NCU04910 | | Other | 3 | | | Avi/Mis | |
| NCU04928 | | Other | 2 | | | | |
| NCU05068 | | Other | 3 | 7 | | Avi | |
| NCU05755 | | Other | 2 | | | Mis | |
| NCU05826 | | Other | 1 | 1 | | | |
| NCU05832 | | Mitochondrion | 5 | | | | |
| NCU05875 | | Other | 2 | | | | |
| NCU05909 | | Mitochondrion | 4 | | | | |
| NCU06181 | | Mitochondrion | 4 | | | | |
| NCU06235 | | Other | 2 | | | | |
| NCU06387 | | Other | 4 | | | Mis | |
| NCU07235 | | Other | 3 | | | | |
| NCU07510 | | Other | 2 | | | | |
| NCU07572 | | Other | 1 | | | | |
| NCU07997 | | Other | 2 | | | Avi/Mis | |
| NCU08383 | | Mitochondrion | 5 | | | | |
| NCU08491 | | Other | 5 | | | | |
| NCU08634 | | Mitochondrion | 4 | | | | |
| NCU09075 | | Other | 1 | | | | |
| NCU09415 | | Other | 2 | | | | |
| NCU09856 | | Other | 2 | | | | |
| NCU09874 | | Other | 1 | 13 | | | |
| NCU09906 | GTNC | Other | 3 | 7 | | Avi | |
| NCU10284 | | | | | | | |
| NCU10697 | | Mitochondrion | 2 | | | | |
| NCU11095 | | Other | 2 | | | | |
| NCU11291 | | Other | 4 | | | | |
| NCU11689 | | Other | 4 | | | | |
| NCU11801 | | | | | | | |
| NCU11932 | | Mitochondrion | 1 | | | | |
| NCU00365 | | Other | 4 | | | | |
| NCU00375 | | Other | 5 | | | | |
| NCU00755 | | Mitochondrion | 4 | 11 | | | |
| NCU01109 | | Mitochondrion | 5 | | | | |
| NCU01292 | | Other | 4 | | | | |
| NCU01551 | | Mitochondrion | 5 | | | | |
| NCU01649 | | Other | 2 | | | | |
| NCU03011 | | Mitochondrion | 3 | | | | |
| NCU03417 | | Other | 3 | | | | |
| NCU04285 | | Other | 4 | | | | |
| NCU04843 | | Other | 3 | | | | |
| NCU04851 | | Other | 2 | | | | |
| NCU04861 | | Other | 4 | | | | |
| NCU04862 | | Other | 2 | | | | |
| NCU05006 | | Other | 4 | | | | |
| NCU05189 | | Other | 2 | 5 | | | |
| NCU05197 | | Other | 2 | | | | |
| NCU05477 | | Other | 4 | | | | |
| NCU05762 | | Other | 5 | | | | |
| NCU05764 | | Other | 1 | | | | |
| NCU05766 | | Other | 3 | | | | |
| NCU05859 | | Other | 3 | | | | |
| NCU05933 | | Other | 2 | | | | |
| NCU06334 | | Other | 3 | | | | |
| NCU07180 | | Other | 2 | | | | |
| NCU07363 | | Other | 3 | 1 | | | |
| NCU08037 | | Other | 2 | | | | |
| NCU08155 | | Mitochondrion | 1 | | | | |
| NCU08156 | | Other | 2 | | | | |
| NCU08170 | | Other | 5 | | | | |
| NCU08455 | | Mitochondrion | 5 | | | | |
| NCU08554 | | Other | 1 | | | | |
| NCU08622 | | Other | 5 | | | | |
| NCU08700 | | Mitochondrion | 4 | | | | |
| NCU08775 | | Mitochondrion | 4 | 1 | | | |
| NCU09272 | | Other | 2 | | | | |
| NCU09273 | | Mitochondrion | 1 | | | | |
| NCU09274 | | Other | 3 | | | | |
| NCU09335 | | Other | 2 | | | | |
| NCU09342 | | Other | 2 | | | | |
| NCU09714 | | Other | 1 | | | | |
| NCU09782 | | Other | 3 | 4 | | | |
| NCU10062 | | Other | 5 | | | | |
| NCU10301 | | Other | 3 | 1 | | | |
| NCU11565 | | Other | 1 | | | | |
| NCU11774 | | | | | | | |
| NCU11881 | | Other | 5 | | | | |
| NCU11974 | | Other | 2 | | | | |
| NCU11989 | | Other | 2 | | | | |
| NCU12012 | | | | | | | |
| NCU12014 | | Other | 4 | | | | |
| NCU12015 | | Other | 4 | | | | |

CAZy: Predicted Domains from the Carbohydrate Active Enzymes database (Cantarelet al., (2009) Nucleic Acids Res 37: D233-238 [PMID: 18838391]).
SignalP: Predicted target location from Signal P (Bendtsen et al., J. Mol. Biol., 340: 783-795, 2004).
TM Domains: Predicted Transmembrane Domains LCMS: Condition under which a gene product was detected in the culture supernatant by Tian et al., Proc Natl Acad Sci 2009.
Tian et al., MA: Condition under which Tian et al., Proc Natl Acad Sci 2009 detected transcriptional changes by microarray.
Tian et al., Annotation: Classification as cellulase or hemicellulase by Tian et al., Proc Natl Acad Sci 2009.

TABLE 1C
FPKMs identified from profiling data in different mutant
strains and growth conditions

| | | | | | | Xylan |
|---|---|---|---|---|---|---|
| Gene | Sucrose | No Carbon | Cellulose | Δclr-1 | Δclr-2 | FPKM |
| NCU00554 | 2050 | 87 | 313 | 116 | 99 | 551 |
| NCU00944 | 283 | 229 | 422 | 161 | 213 | 252 |
| NCU01195 | 15484 | 1792 | 3179 | 982 | 887 | 16026 |
| NCU02785 | 1091 | 62 | 146 | 79 | 78 | 300 |
| NCU02954 | 1862 | 154 | 250 | 131 | 122 | 1000 |
| NCU03131 | 149 | 68 | 236 | 97 | 78 | 184 |
| NCU04216 | 1239 | 8 | 26 | 5 | 5 | 236 |
| NCU04298 | 9 | 105 | 218 | 119 | 140 | 785 |
| NCU04837 | 2537 | 170 | 336 | 157 | 181 | 694 |
| NCU05548 | 2782 | 111 | 581 | 63 | 73 | 563 |
| NCU07413 | 35 | 13 | 106 | 19 | 18 | 95 |
| NCU10283 | 1142 | 121 | 522 | 177 | 154 | 410 |
| NCU00461 | 91 | 4049 | 1099 | 4925 | 2071 | 255 |
| NCU00591 | 22 | 1360 | 458 | 2184 | 1250 | 61 |
| NCU00680 | 555 | 1138 | 327 | 1280 | 888 | 387 |
| NCU01402 | 1 | 203 | 58 | 744 | 687 | 5 |
| NCU02127 | 10 | 662 | 177 | 1585 | 794 | 44 |
| NCU02704 | 14 | 349 | 104 | 1118 | 533 | 15 |
| NCU02727 | 290 | 220 | 141 | 435 | 185 | 183 |
| NCU02936 | 103 | 451 | 151 | 1083 | 527 | 40 |
| NCU03076 | 322 | 746 | 311 | 1571 | 904 | 194 |
| NCU03415 | 43 | 17491 | 4745 | 15467 | 11754 | 2948 |
| NCU03648 | 2 | 1496 | 667 | 2234 | 1969 | 221 |
| NCU03913 | 35 | 349 | 146 | 1194 | 580 | 40 |
| NCU05499 | 11 | 809 | 306 | 2076 | 1535 | 28 |
| NCU05537 | 14 | 465 | 224 | 1257 | 813 | 32 |
| NCU05977 | 11 | 762 | 100 | 486 | 310 | 761 |
| NCU06448 | 944 | 1508 | 978 | 2366 | 1474 | 722 |
| NCU06543 | 151 | 784 | 414 | 1264 | 762 | 166 |
| NCU07153 | 738 | 2886 | 1877 | 6968 | 4284 | 718 |
| NCU08216 | 340 | 187 | 80 | 421 | 251 | 67 |
| NCU09116 | 376 | 206 | 82 | 417 | 229 | 62 |
| NCU09266 | 101 | 1296 | 603 | 2306 | 1479 | 379 |
| NCU09864 | 40 | 1090 | 416 | 2430 | 1372 | 52 |
| NCU11195 | 166 | 677 | 307 | 598 | 450 | 261 |
| NCU01830 | 9 | 645 | 446 | 1362 | 1859 | 11 |
| NCU02126 | 7 | 383 | 117 | 687 | 407 | 40 |
| NCU01744 | 1187 | 197 | 500 | 461 | 264 | 1148 |
| NCU03748 | 5279 | 95 | 245 | 130 | 178 | 1873 |
| NCU06625 | 41 | 400 | 61 | 112 | 113 | 70 |
| NCU04130 | 33 | 155 | 375 | 612 | 304 | 350 |
| NCU10110 | 8 | 56 | 1068 | 615 | 786 | 2096 |
| NCU03861 | 3 | 31 | 5 | 5 | 8 | 0.01 |
| NCU07623 | 1 | 69 | 29 | 30 | 28 | 9 |
| NCU01427 | 170 | 1652 | 490 | 537 | 591 | 196 |
| NCU03651 | 256 | 51 | 979 | 243 | 54 | 809 |
| NCU02579 | 27 | 1820 | 878 | 1457 | 1443 | 181 |
| NCU07307 | 1700 | 148 | 38 | 59 | 53 | 785 |
| NCU07308 | 2206 | 96 | 23 | 42 | 37 | 720 |
| NCU05858 | 3 | 97 | 17 | 16 | 16 | 16 |
| NCU01013 | 260 | 183 | 337 | 177 | 187 | 311 |
| NCU06189 | 468 | 38 | 76 | 42 | 41 | 308 |
| NCU05165 | 100 | 247 | 517 | 87 | 253 | 213 |
| NCU04865 | 22 | 218 | 46 | 72 | 108 | 72 |
| NCU05011 | 12 | 17 | 45 | 37 | 41 | 24 |
| NCU00762 | 11 | 11 | 39334 | 33 | 26 | 292 |
| NCU00836 | 10 | 9 | 9725 | 21 | 11 | 58 |
| NCU01050 | 6 | 0.01 | 27848 | 3 | 0.01 | 9 |
| NCU02240 | 8 | 48 | 19889 | 63 | 50 | 180 |
| NCU02344 | 53 | 16 | 278 | 13 | 9 | 40 |
| NCU02916 | 24 | 33 | 9996 | 39 | 57 | 79 |
| NCU03328 | 7 | 162 | 7020 | 170 | 187 | 47 |
| NCU04854 | 16 | 41 | 2195 | 44 | 46 | 61 |
| NCU05057 | 11 | 31 | 12125 | 38 | 40 | 91 |
| NCU05121 | 8 | 35 | 496 | 25 | 25 | 19 |
| NCU07190 | 39 | 98 | 54230 | 101 | 383 | 1977 |
| NCU07340 | 32 | 118 | 104476 | 170 | 152 | 274 |
| NCU07760 | 28 | 19 | 174 | 32 | 27 | 80 |
| NCU07898 | 3 | 15 | 7268 | 26 | 25 | 59 |
| NCU08760 | 16 | 25 | 24669 | 31 | 19 | 219 |
| NCU09680 | 41 | 99 | 62514 | 130 | 126 | 70 |
| NCU03322 | 1 | 73 | 1360 | 641 | 782 | 1879 |
| NCU07362 | 82 | 541 | 202 | 279 | 259 | 380 |
| NCU03813 | 14 | 589 | 1740 | 1581 | 1072 | 2822 |
| NCU04539 | 2 | 57 | 25 | 22 | 30 | 17 |
| NCU08687 | 110 | 283 | 1342 | 431 | 354 | 1147 |
| NCU05133 | 957 | 320 | 1831 | 1241 | 1520 | 1247 |
| NCU09705 | 44 | 266 | 4525 | 2740 | 3468 | 11549 |
| NCU07277 | 682 | 1273 | 3013 | 3216 | 3317 | 2258 |
| NCU04797 | 30 | 877 | 258 | 1646 | 542 | 167 |
| NCU00575 | 2198 | 677 | 2103 | 1123 | 1057 | 1812 |
| NCU04401 | 8 | 66 | 3833 | 1630 | 2316 | 7742 |
| NCU02855 | 5 | 11 | 4659 | 63 | 36 | 385 |
| NCU05924 | 5 | 5 | 19425 | 14 | 4 | 2339 |
| NCU05955 | 14 | 100 | 4569 | 88 | 102 | 64 |
| NCU07326 | 18 | 55 | 10461 | 63 | 43 | 110 |
| NCU09775 | 0.01 | 3 | 99 | 10 | 6 | 302 |
| NCU04997 | 5 | 3 | 116 | 16 | 8 | 20 |
| NCU01900 | 28 | 210 | 11254 | 6388 | 7907 | 14560 |
| NCU02343 | 41 | 458 | 9436 | 14639 | 15125 | 23514 |
| NCU07225 | 35 | 111 | 104230 | 7967 | 5971 | 24494 |
| NCU08087 | 72 | 4 | 35 | 83 | 63 | 129 |
| NCU08189 | 27 | 208 | 42393 | 39471 | 48947 | 50079 |
| NCU09652 | 24 | 340 | 4032 | 3208 | 3390 | 5729 |
| NCU06881 | 249 | 259 | 169 | 421 | 251 | 125 |
| NCU01853 | 0.01 | 123 | 50 | 131 | 131 | 25 |
| NCU02287 | 134 | 703 | 406 | 1073 | 886 | 94 |
| NCU02894 | 107 | 191 | 83 | 140 | 126 | 113 |
| NCU07263 | 166 | 197 | 68 | 278 | 129 | 24 |
| NCU08924 | 132 | 2324 | 770 | 1742 | 1287 | 205 |
| NCU09692 | 24 | 383 | 124 | 330 | 267 | 71 |
| NCU04796 | 166 | 1919 | 704 | 1594 | 1469 | 135 |
| NCU09732 | 112 | 772 | 430 | 1876 | 740 | 222 |
| NCU07719 | 865 | 941 | 441 | 572 | 562 | 616 |
| NCU12093 | 14 | 279 | 74 | 156 | 136 | 23 |
| NCU05818 | 2 | 29 | 10 | 5 | 5 | 4 |
| NCU04078 | 15 | 360 | 117 | 643 | 316 | 48 |
| NCU07617 | 9 | 196 | 37 | 41 | 49 | 7 |
| NCU08398 | 2 | 52 | 5368 | 66 | 25 | 84 |
| NCU10683 | 12 | 37 | 99 | 36 | 32 | 41 |
| NCU10063 | 45 | 256 | 68 | 112 | 107 | 150 |
| NCU04933 | 35 | 27 | 155 | 249 | 248 | 100 |
| NCU00890 | 18 | 63 | 1613 | 139 | 58 | 536 |
| NCU04623 | 3 | 40 | 128 | 38 | 69 | 161 |
| NCU04952 | 1 | 62 | 777 | 22 | 32 | 17 |
| NCU05956 | 5 | 398 | 935 | 379 | 446 | 134 |
| NCU07487 | 2 | 6 | 988 | 6 | 13 | 5 |
| NCU08755 | 6 | 468 | 8742 | 467 | 3396 | 2802 |
| NCU00130 | 30 | 159 | 39866 | 759 | 2765 | 1736 |
| NCU00709 | 2 | 6 | 192 | 300 | 311 | 2803 |
| NCU04168 | 4 | 18 | 166 | 407 | 302 | 40 |
| NCU09904 | 13 | 16 | 76 | 111 | 98 | 198 |
| NCU09923 | 1 | 12 | 222 | 92 | 89 | 2701 |
| NCU03098 | 1 | 360 | 56 | 75 | 107 | 17 |
| NCU09028 | 0.01 | 26 | 8 | 7 | 9 | 6 |
| NCU09281 | 16 | 704 | 133 | 171 | 180 | 23 |
| NCU10107 | 0.01 | 165 | 2709 | 1434 | 2108 | 3537 |
| NCU00206 | 12 | 24 | 12252 | 18 | 23 | 16 |
| NCU00710 | 11 | 11 | 921 | 43 | 44 | 174 |
| NCU01059 | 37 | 42 | 253 | 26 | 91 | 39 |
| NCU03181 | 5 | 32 | 2023 | 39 | 21 | 49 |
| NCU04494 | 87 | 74 | 529 | 65 | 75 | 143 |
| NCU05598 | 39 | 26 | 313 | 39 | 36 | 144 |
| NCU05751 | 4 | 10 | 1138 | 5 | 9 | 1422 |
| NCU08176 | 6 | 18 | 1547 | 35 | 24 | 268 |
| NCU08746 | 3 | 44 | 289 | 22 | 55 | 639 |
| NCU08785 | 1 | 26 | 5257 | 3 | 3 | 126 |
| NCU09445 | 1 | 0.01 | 28 | 0.01 | 2 | 5 |
| NCU09491 | 0.01 | 19 | 508 | 21 | 15 | 172 |
| NCU09582 | 9 | 17 | 2971 | 54 | 60 | 759 |
| NCU09764 | 28 | 9 | 2438 | 14 | 15 | 29 |
| NCU09774 | 0.01 | 0.01 | 18 | 0.01 | 0.01 | 0.01 |
| NCU09976 | 3 | 4 | 77 | 3 | 6 | 20 |
| NCU10045 | 18 | 71 | 1641 | 213 | 206 | 1324 |
| NCU11068 | 6 | 71 | 12618 | 670 | 6 | 1972 |
| NCU11198 | 36 | 40 | 742 | 47 | 49 | 971 |
| NCU02904 | 109 | 40 | 115 | 65 | 54 | 147 |
| NCU04870 | 2 | 6 | 7059 | 218 | 261 | 3933 |
| NCU05159 | 13 | 91 | 27383 | 1840 | 1333 | 7683 |
| NCU09518 | 8 | 32 | 107 | 52 | 54 | 17 |
| NCU09664 | 0.01 | 0.01 | 1039 | 4 | 4 | 130 |
| NCU09924 | 2 | 19 | 112 | 43 | 45 | 2511 |
| NCU03158 | 122 | 211 | 86 | 108 | 120 | 64 |
| NCU07067 | 5 | 1242 | 225 | 426 | 368 | 121 |
| NCU01353 | 1106 | 104 | 483 | 281 | 328 | 628 |
| NCU07269 | 1 | 179 | 57 | 43 | 45 | 8 |
| NCU06023 | 17 | 54 | 21 | 28 | 27 | 19 |
| NCU06025 | 32 | 68 | 26 | 27 | 27 | 24 |
| NCU00761 | 0.01 | 3 | 25 | 3 | 4 | 0.01 |
| NCU06650 | 90 | 902 | 473 | 238 | 128 | 1654 |
| NCU09416 | 0.01 | 0.01 | 1614 | 4 | 4 | 106 |
| NCU00292 | 7 | 64 | 2892 | 2788 | 3721 | 4938 |
| NCU03903 | 32 | 97 | 392 | 236 | 241 | 203 |
| NCU04475 | 22 | 231 | 4395 | 2771 | 1833 | 2387 |
| NCU06364 | 202 | 108 | 812 | 370 | 586 | 1635 |
| NCU09575 | 20 | 632 | 228 | 245 | 222 | 95 |
| NCU04230 | 250 | 1891 | 185 | 1237 | 538 | 80 |
| NCU02366 | 3209 | 11379 | 4010 | 5034 | 5173 | 3702 |
| NCU04280 | 1323 | 271 | 70 | 99 | 107 | 394 |
| NCU04385 | 1604 | 43 | 14 | 18 | 18 | 1035 |
| NCU02969 | 81 | 45 | 10 | 12 | 14 | 34 |
| NCU08164 | 89 | 193 | 685 | 340 | 367 | 765 |
| NCU00891 | 98 | 330 | 6350 | 7725 | 8502 | 22723 |
| NCU08384 | 56 | 72 | 22043 | 28279 | 28261 | 76835 |
| NCU08272 | 141 | 380 | 170 | 424 | 261 | 315 |
| NCU07619 | 8 | 31 | 14 | 19 | 20 | 10 |
| NCU05304 | 2192 | 188 | 412 | 175 | 219 | 837 |
| NCU01510 | 15 | 772 | 319 | 623 | 681 | 124 |
| NCU05768 | 6 | 39 | 0.01 | 2 | 0.01 | 0.01 |
| NCU07154 | 12 | 158 | 65 | 101 | 93 | 23 |
| NCU01998 | 241 | 46 | 107 | 96 | 84 | 246 |
| NCU08457 | 200 | 210102 | 18274 | 13320 | 20799 | 1223 |
| NCU06386 | 87 | 127 | 300 | 160 | 155 | 175 |
| NCU09425 | 40 | 740 | 3087 | 1228 | 1964 | 538 |
| NCU02478 | 152 | 16 | 57 | 32 | 39 | 39 |
| NCU09175 | 2497 | 5190 | 10237 | 7817 | 8879 | 6804 |
| NCU01689 | 1517 | 418 | 558 | 256 | 402 | 1214 |
| NCU11721 | 233 | 209 | 367 | 173 | 156 | 242 |
| NCU02396 | 131 | 66 | 27 | 59 | 33 | 24 |
| NCU07481 | 76 | 25 | 62 | 43 | 46 | 121 |
| NCU03137 | 271 | 112 | 308 | 146 | 138 | 153 |
| NCU02500 | 29 | 1042 | 2415 | 0.01 | 0.01 | 732 |
| NCU00565 | 498 | 254 | 92 | 217 | 155 | 206 |
| NCU02705 | 245 | 54 | 26 | 117 | 61 | 37 |
| NCU05225 | 57 | 312 | 115 | 176 | 161 | 170 |
| NCU08326 | 204 | 119 | 62 | 220 | 91 | 73 |
| NCU00326 | 465 | 430 | 1721 | 260 | 639 | 916 |
| NCU08691 | 3 | 47 | 13 | 15 | 12 | 6 |
| NCU09043 | 30 | 3328 | 1226 | 1683 | 1701 | 602 |
| NCU07432 | 170 | 180 | 544 | 326 | 270 | 95 |
| NCU05841 | 356 | 46 | 484 | 149 | 126 | 441 |
| NCU02361 | 146 | 204 | 119 | 359 | 203 | 747 |
| NCU10051 | 2833 | 301 | 12598 | 4676 | 1474 | 2773 |
| NCU04720 | 1382 | 231 | 1993 | 748 | 1018 | 2367 |
| NCU04698 | 349 | 178 | 419 | 238 | 318 | 176 |
| NCU00177 | 2560 | 43 | 100 | 35 | 40 | 710 |
| NCU01786 | 1012 | 45 | 117 | 32 | 53 | 560 |
| NCU03117 | 6482 | 42 | 201 | 21 | 20 | 1298 |
| NCU05254 | 229 | 17 | 33 | 11 | 16 | 106 |
| NCU03963 | 1528 | 15 | 172 | 6 | 23 | 514 |
| NCU09659 | 685 | 134 | 70 | 472 | 193 | 640 |
| NCU03488 | 1689 | 1939 | 508 | 917 | 875 | 1054 |
| NCU02657 | 11661 | 70 | 205 | 80 | 83 | 1464 |
| NCU05855 | 13 | 20 | 315 | 42 | 49 | 41 |
| NCU08044 | 385 | 420 | 1387 | 710 | 381 | 566 |
| NCU09283 | 83 | 337 | 812 | 244 | 319 | 267 |
| NCU11243 | 2 | 190 | 406 | 123 | 116 | 43 |
| NCU01378 | 88 | 574 | 235 | 436 | 374 | 186 |
| NCU01861 | 0.01 | 394 | 138 | 717 | 593 | 497 |
| NCU04583 | 237 | 103 | 47 | 381 | 409 | 42 |
| NCU06616 | 19 | 636 | 149 | 853 | 329 | 45 |
| NCU07325 | 3 | 1419 | 487 | 922 | 1047 | 177 |
| NCU08771 | 28 | 3639 | 1648 | 5213 | 3274 | 485 |
| NCU09553 | 201 | 574 | 217 | 918 | 509 | 74 |
| NCU10055 | 3 | 812 | 330 | 851 | 856 | 321 |
| NCU11289 | 2 | 26 | 5 | 14 | 17 | 0.01 |
| NCU08750 | 33 | 213 | 1249 | 466 | 690 | 518 |
| NCU08752 | 6 | 146 | 2469 | 450 | 1299 | 5930 |
| NCU03049 | 5 | 106 | 43 | 58 | 55 | 35 |
| NCU05653 | 49 | 62 | 21 | 39 | 27 | 16 |
| NCU07133 | 12 | 1196 | 443 | 713 | 603 | 441 |
| NCU08925 | 38 | 135 | 51 | 78 | 69 | 28 |
| NCU09865 | 3 | 21 | 8 | 12 | 11 | 0.01 |
| NCU11365 | 62 | 96 | 44 | 73 | 48 | 39 |
| NCU07055 | 0.01 | 16 | 191 | 75 | 88 | 212 |
| NCU07224 | 0.01 | 0.01 | 203 | 22 | 19 | 170 |
| NCU01061 | 47 | 194 | 35 | 39 | 34 | 8 |
| NCU03566 | 30 | 164 | 72 | 71 | 82 | 78 |
| NCU04260 | 28 | 396 | 172 | 143 | 166 | 74 |
| NCU05094 | 7 | 379 | 101 | 125 | 142 | 40 |
| NCU05986 | 86 | 230 | 128 | 120 | 124 | 76 |
| NCU06153 | 0.01 | 634 | 350 | 196 | 213 | 128 |
| NCU09674 | 209 | 1068 | 454 | 452 | 424 | 601 |
| NCU11241 | 265 | 492 | 158 | 225 | 194 | 128 |
| NCU03013 | 452 | 1461 | 3723 | 3169 | 3589 | 4288 |
| NCU05319 | 39 | 5 | 25 | 12 | 10 | 19 |
| NCU04430 | 7 | 71 | 102 | 1738 | 599 | 45 |
| NCU02059 | 520 | 83 | 1010 | 171 | 121 | 257 |
| NCU00831 | 162 | 796 | 532 | 1450 | 897 | 559 |
| NCU06055 | 161 | 151 | 347 | 273 | 246 | 233 |
| NCU00263 | 55 | 118 | 158 | 670 | 324 | 191 |
| NCU07200 | 215 | 477 | 667 | 4484 | 1939 | 312 |
| NCU09992 | 25 | 177 | 420 | 3258 | 1302 | 143 |
| NCU09265 | 1614 | 952 | 5131 | 1413 | 1691 | 2611 |
| NCU00813 | 165 | 590 | 1841 | 555 | 639 | 598 |
| NCU02455 | 1925 | 1985 | 5593 | 2466 | 2663 | 3092 |
| NCU09223 | 1323 | 1972 | 8850 | 2804 | 2900 | 2955 |
| NCU09485 | 444 | 248 | 940 | 299 | 324 | 489 |
| NCU01648 | 838 | 418 | 1306 | 631 | 599 | 1003 |
| NCU10497 | 738 | 602 | 1111 | 624 | 720 | 856 |
| NCU00669 | 494 | 336 | 735 | 331 | 389 | 575 |
| NCU02118 | 66 | 74 | 45 | 62 | 59 | 28 |
| NCU10762 | 149 | 47 | 123 | 80 | 67 | 161 |
| NCU00244 | 126 | 117 | 59 | 56 | 60 | 58 |
| NCU01068 | 135 | 371 | 1235 | 552 | 519 | 988 |
| NCU03319 | 940 | 1076 | 2513 | 1218 | 1267 | 1413 |
| NCU08761 | 137 | 117 | 269 | 113 | 132 | 184 |
| NCU01279 | 355 | 489 | 165 | 311 | 352 | 91 |
| NCU03819 | 117 | 109 | 252 | 148 | 160 | 133 |
| NCU08607 | 278 | 312 | 764 | 444 | 394 | 465 |
| NCU09195 | 151 | 453 | 168 | 260 | 285 | 126 |
| NCU07736 | 42 | 17 | 131 | 451 | 277 | 297 |
| NCU01290 | 2430 | 43 | 74 | 20 | 29 | 681 |
| NCU03396 | 2598 | 26 | 54 | 10 | 16 | 524 |
| NCU09521 | 618 | 12 | 28 | 6 | 9 | 173 |
| NCU03897 | 1005 | 305 | 611 | 239 | 291 | 569 |
| NCU07746 | 448 | 249 | 969 | 303 | 300 | 424 |
| NCU08897 | 1372 | 727 | 2550 | 971 | 1068 | 1948 |
| NCU00169 | 486 | 315 | 1214 | 404 | 395 | 655 |
| NCU02681 | 691 | 372 | 1150 | 435 | 391 | 519 |
| NCU06333 | 488 | 307 | 1502 | 340 | 339 | 589 |
| NCU01146 | 1459 | 761 | 1819 | 1168 | 1149 | 1489 |
| NCU00931 | 308 | 6 | 18 | 7 | 9 | 98 |
| NCU07008 | 47 | 226 | 107 | 103 | 99 | 130 |
| NCU03295 | 13 | 200 | 125 | 322 | 211 | 42 |
| NCU07737 | 62 | 113 | 881 | 2349 | 1712 | 516 |
| NCU08038 | 15 | 85 | 261 | 125 | 146 | 69 |
| NCU02729 | 621 | 4 | 16 | 3 | 4 | 111 |
| NCU03364 | 209 | 744 | 1586 | 596 | 647 | 654 |
| NCU03817 | 66 | 135 | 46 | 62 | 62 | 58 |
| NCU06111 | 350 | 164 | 87 | 70 | 57 | 172 |
| NCU08115 | 47 | 48 | 396 | 97 | 185 | 82 |
| NCU06931 | 9 | 48 | 33 | 75 | 53 | 14 |
| NCU04077 | 1661 | 38 | 212 | 71 | 83 | 1471 |
| NCU01862 | 10 | 369 | 103 | 229 | 239 | 31 |
| NCU02795 | 61 | 24 | 53 | 47 | 52 | 64 |
| NCU00812 | 459 | 103 | 208 | 88 | 131 | 217 |
| NCU01856 | 850 | 504 | 2100 | 752 | 727 | 711 |
| NCU03725 | 437 | 184 | 1312 | 322 | 317 | 701 |
| NCU06971 | 10 | 336 | 1103 | 330 | 475 | 271 |
| NCU07705 | 39 | 173 | 751 | 11 | 510 | 417 |
| NCU08042 | 3 | 9 | 1262 | 15 | 0.01 | 16 |
| NCU03643 | 21 | 198 | 57 | 246 | 163 | 24 |
| NCU03043 | 147 | 1202 | 276 | 657 | 544 | 429 |
| NCU05767 | 0.01 | 263 | 18 | 26 | 33 | 0.01 |
| NCU00316 | 124 | 249 | 122 | 366 | 199 | 128 |
| NCU00721 | 98 | 279 | 152 | 873 | 742 | 147 |
| NCU07578 | 10 | 41 | 34 | 65 | 50 | 8 |
| NCU04435 | 6 | 18 | 3 | 5 | 6 | 25 |
| NCU05198 | 171 | 136 | 54 | 87 | 91 | 99 |
| NCU10721 | 100 | 116 | 398 | 137 | 129 | 242 |
| NCU11342 | 1 | 19 | 118 | 33 | 37 | 8 |
| NCU00821 | 492 | 1869 | 1080 | 3808 | 2577 | 1577 |
| NCU08561 | 24 | 410 | 62 | 316 | 152 | 28 |
| NCU09287 | 8 | 3578 | 2172 | 6710 | 5148 | 1987 |
| NCU00801 | 29 | 262 | 17161 | 861 | 1533 | 340 |
| NCU00809 | 43 | 85 | 194 | 163 | 131 | 499 |
| NCU07668 | 33 | 38 | 159 | 86 | 81 | 28 |
| NCU05089 | 38 | 72 | 9 | 21 | 19 | 14 |
| NCU08152 | 0.01 | 159 | 22 | 64 | 53 | 0.01 |
| NCU01633 | 3273 | 118 | 394 | 1728 | 1321 | 36 |
| NCU04537 | 12 | 15 | 35 | 118 | 84 | 339 |
| NCU05853 | 17 | 1550 | 19630 | 5956 | 16364 | 2012 |
| NCU08114 | 25 | 508 | 45944 | 13300 | 29186 | 11873 |
| NCU00023 | 459 | 594 | 1250 | 411 | 450 | 554 |
| NCU02009 | 295 | 443 | 4284 | 707 | 715 | 542 |
| NCU07068 | 7 | 2473 | 873 | 1574 | 1697 | 233 |
| NCU03305 | 583 | 367 | 672 | 475 | 434 | 701 |
| NCU08225 | 707 | 168 | 73 | 106 | 104 | 718 |
| NCU08147 | 113 | 3406 | 1284 | 2158 | 2101 | 814 |
| NCU06366 | 338 | 451 | 202 | 213 | 235 | 215 |
| NCU05585 | 10 | 1426 | 433 | 802 | 647 | 307 |
| NCU06138 | 11 | 167 | 3757 | 2567 | 2713 | 5610 |
| NCU05591 | 59 | 94 | 312 | 270 | 403 | 105 |
| NCU06032 | 84 | 137 | 334 | 117 | 120 | 135 |
| NCU09098 | 40 | 72 | 196 | 60 | 69 | 57 |
| NCU10009 | 103 | 37 | 84 | 42 | 51 | 102 |
| NCU00290 | 2 | 172 | 38 | 140 | 78 | 31 |
| NCU09580 | 7 | 40 | 12 | 45 | 31 | 14 |
| NCU00803 | 22 | 157 | 57 | 77 | 76 | 17 |
| NCU04374 | 16 | 195 | 37 | 62 | 67 | 49 |
| NCU08425 | 14 | 364 | 41 | 105 | 88 | 10 |
| NCU04097 | 1105 | 99 | 95 | 151 | 99 | 83 |
| NCU05079 | 364 | 981 | 1440 | 6283 | 3699 | 226 |
| NCU07546 | 89 | 70 | 231 | 157 | 189 | 87 |
| NCU08148 | 738 | 193 | 420 | 1416 | 611 | 472 |
| NCU03107 | 109 | 354 | 95 | 75 | 82 | 43 |
| NCU00586 | 17 | 547 | 97 | 400 | 333 | 11 |
| NCU00716 | 15 | 167 | 49 | 228 | 62 | 0.01 |
| NCU00025 | 166 | 1481 | 553 | 924 | 881 | 246 |
| NCU00848 | 41 | 261 | 9 | 11 | 7 | 23 |
| NCU00449 | 3 | 7 | 1235 | 8 | 12 | 36 |
| NCU00849 | 4 | 66 | 9 | 6 | 0.01 | 0.01 |
| NCU01058 | 6 | 14 | 73 | 12 | 30 | 0.01 |
| NCU01076 | 0.01 | 3 | 784 | 0.01 | 0.01 | 0.01 |
| NCU01196 | 60 | 55 | 88 | 41 | 30 | 127 |
| NCU01978 | 15 | 21 | 47 | 17 | 24 | 21 |
| NCU02138 | 113 | 158 | 462 | 69 | 59 | 55 |
| NCU03083 | 677 | 273 | 890 | 355 | 347 | 593 |
| NCU03982 | 2821 | 1679 | 13085 | 3300 | 3442 | 5011 |
| NCU04948 | 1 | 2 | 18 | 3 | 5 | 0.01 |
| NCU05230 | 101 | 23 | 84 | 24 | 27 | 67 |
| NCU05863 | 0.01 | 21 | 563 | 12 | 69 | 0.01 |
| NCU05864 | 23 | 64 | 14268 | 143 | 96 | 212 |
| NCU06152 | 4 | 45 | 76 | 23 | 35 | 37 |
| NCU06607 | 35 | 21 | 794 | 31 | 26 | 20 |
| NCU08756 | 4 | 10 | 120 | 10 | 46 | 28 |
| NCU08790 | 1 | 10 | 389 | 16 | 44 | 103 |
| NCU09295 | 321 | 86 | 292 | 115 | 131 | 348 |
| NCU09524 | 3 | 14 | 2814 | 29 | 10 | 11 |
| NCU11268 | 26 | 140 | 471 | 125 | 149 | 41 |
| NCU11542 | 10 | 76 | 261 | 84 | 78 | 31 |
| NCU11753 | 32 | 37 | 163 | 21 | 20 | 532 |
| NCU00175 | 13 | 1227 | 188 | 932 | 575 | 83 |
| NCU00250 | 9 | 234 | 67 | 187 | 144 | 0.01 |
| NCU00322 | 174 | 566 | 235 | 882 | 592 | 55 |
| NCU00695 | 55 | 1158 | 939 | 2708 | 2217 | 485 |
| NCU07311 | 144 | 4941 | 1286 | 3903 | 3941 | 1195 |
| NCU08171 | 509 | 1381 | 376 | 852 | 648 | 1136 |
| NCU08521 | 0.01 | 20 | 9 | 14 | 15 | 0.01 |
| NCU10507 | 3 | 251 | 91 | 182 | 143 | 58 |
| NCU07143 | 11 | 86 | 13931 | 645 | 526 | 3583 |
| NCU07222 | 48 | 2 | 147 | 42 | 22 | 114 |
| NCU08371 | 54 | 176 | 706 | 379 | 347 | 148 |
| NCU09506 | 369 | 2 | 50 | 13 | 6 | 17 |
| NCU04106 | 388 | 319 | 61 | 107 | 98 | 155 |
| NCU06526 | 7 | 708 | 145 | 222 | 346 | 35 |
| NCU09196 | 4 | 94 | 42 | 51 | 60 | 10 |
| NCU11466 | 2 | 221 | 92 | 133 | 152 | 14 |
| NCU11957 | 0.01 | 19 | 7 | 14 | 7 | 0.01 |
| NCU00995 | 2433 | 398 | 1114 | 3520 | 1448 | 924 |
| NCU01720 | 931 | 61 | 178 | 270 | 226 | 760 |
| NCU03293 | 12057 | 118 | 359 | 844 | 656 | 5218 |
| NCU04169 | 3 | 20 | 2545 | 5669 | 5833 | 803 |
| NCU04170 | 11 | 35 | 203 | 466 | 412 | 40 |
| NCU04467 | 63 | 56 | 320 | 323 | 235 | 71 |
| NCU04932 | 197 | 136 | 873 | 1493 | 1451 | 1072 |
| NCU04998 | 5 | 5 | 27 | 22 | 18 | 0.01 |
| NCU05134 | 653 | 65 | 1366 | 826 | 1673 | 2090 |
| NCU05350 | 1 | 37 | 315 | 191 | 286 | 447 |
| NCU05829 | 294 | 22 | 65 | 55 | 45 | 139 |
| NCU05852 | 4 | 67 | 200 | 161 | 219 | 35 |
| NCU05908 | 7 | 20 | 44 | 67 | 27 | 138 |
| NCU06143 | 16 | 147 | 3784 | 3215 | 3870 | 7304 |
| NCU06983 | 564 | 103 | 620 | 1152 | 1130 | 1537 |
| NCU06991 | 97 | 22 | 99 | 97 | 125 | 246 |
| NCU08635 | 0.01 | 29 | 61 | 101 | 83 | 0.01 |
| NCU09046 | 0.01 | 6 | 22 | 54 | 36 | 8 |
| NCU09172 | 0.01 | 0.01 | 9 | 1 | 1 | 0.01 |
| NCU09424 | 1 | 13 | 49 | 34 | 36 | 20 |
| NCU09498 | 340 | 67 | 252 | 430 | 417 | 790 |
| NCU09823 | 28 | 101 | 350 | 697 | 526 | 333 |
| NCU09848 | 215 | 15 | 76 | 53 | 51 | 32 |
| NCU10014 | 419 | 93 | 997 | 1874 | 1669 | 1536 |
| NCU10039 | 8 | 56 | 888 | 376 | 441 | 167 |
| NCU10687 | 258 | 62 | 165 | 219 | 241 | 958 |
| NCU00561 | 23 | 601 | 165 | 233 | 249 | 67 |
| NCU00859 | 53 | 1441 | 184 | 112 | 162 | 50 |
| NCU02042 | 70 | 164 | 98 | 40 | 51 | 106 |
| NCU02164 | 75 | 909 | 287 | 346 | 343 | 105 |
| NCU04482 | 7 | 70 | 9 | 19 | 10 | 42 |
| NCU04486 | 18 | 449 | 157 | 152 | 193 | 58 |
| NCU05236 | 7 | 386 | 120 | 147 | 141 | 77 |
| NCU05761 | 0.01 | 16 | 0.01 | 0.01 | 0.01 | 0.01 |
| NCU05763 | 0.01 | 18 | 0.01 | 0.01 | 0.01 | 0.01 |
| NCU06328 | 63 | 517 | 97 | 45 | 48 | 124 |
| NCU07948 | 11 | 206 | 28 | 33 | 41 | 28 |
| NCU08140 | 0.01 | 5 | 0.01 | 0.01 | 0.01 | 0.01 |
| NCU08447 | 7 | 144 | 39 | 44 | 40 | 16 |
| NCU09734 | 13 | 653 | 25 | 43 | 53 | 24 |
| NCU12011 | 0.01 | 30 | 2 | 3 | 4 | 0.01 |
| NCU00408 | 245 | 33 | 79 | 19 | 26 | 73 |
| NCU00633 | 464 | 87 | 244 | 67 | 116 | 141 |
| NCU00870 | 58 | 103 | 7992 | 289 | 210 | 1281 |
| NCU00871 | 0.01 | 3 | 19 | 3 | 3 | 0.01 |
| NCU00965 | 410 | 321 | 1037 | 362 | 347 | 506 |
| NCU01003 | 17 | 9 | 50 | 13 | 10 | 22 |
| NCU01049 | 0.01 | 0.01 | 59 | 0.01 | 0.01 | 0.01 |
| NCU01077 | 2 | 10 | 48 | 9 | 10 | 0.01 |
| NCU01148 | 28 | 27 | 106 | 37 | 36 | 36 |
| NCU01944 | 58 | 20 | 441 | 46 | 47 | 43 |
| NCU01970 | 96 | 1490 | 2320 | 719 | 761 | 1015 |
| NCU01983 | 1113 | 36 | 184 | 35 | 43 | 171 |
| NCU02008 | 90 | 108 | 235 | 61 | 65 | 100 |
| NCU02061 | 24 | 17 | 66 | 0.01 | 2 | 39 |
| NCU02600 | 3 | 8 | 26 | 8 | 9 | 0.01 |
| NCU02625 | 21 | 45 | 150 | 44 | 45 | 21 |
| NCU02720 | 419 | 27 | 79 | 21 | 28 | 106 |
| NCU02915 | 34 | 77 | 818 | 153 | 142 | 74 |
| NCU03152 | 317 | 89 | 325 | 103 | 95 | 180 |
| NCU03329 | 91 | 170 | 1134 | 326 | 293 | 135 |
| NCU03433 | 17 | 8 | 39 | 10 | 10 | 18 |
| NCU04127 | 2828 | 968 | 3165 | 993 | 1099 | 1600 |
| NCU04522 | 6 | 16 | 2283 | 22 | 102 | 45 |
| NCU04830 | 532 | 66 | 381 | 109 | 80 | 292 |
| NCU04905 | 347 | 354 | 1506 | 542 | 464 | 924 |
| NCU05056 | 0.01 | 0.01 | 35 | 0.01 | 0.01 | 0.01 |
| NCU05170 | 318 | 205 | 652 | 343 | 208 | 463 |
| NCU05569 | 128 | 74 | 147 | 37 | 42 | 61 |
| NCU05574 | 22 | 59 | 699 | 46 | 156 | 328 |
| NCU05846 | 43 | 120 | 3033 | 165 | 521 | 251 |
| NCU05848 | 1 | 0.01 | 24 | 0.01 | 3 | 0.01 |
| NCU05854 | 12 | 49 | 227 | 59 | 67 | 33 |
| NCU06214 | 1375 | 143 | 262 | 90 | 107 | 327 |
| NCU06312 | 5 | 34 | 62 | 17 | 27 | 12 |
| NCU06704 | 981 | 347 | 1914 | 362 | 466 | 544 |
| NCU07207 | 0.01 | 18 | 44 | 7 | 9 | 0.01 |
| NCU07336 | 39 | 15 | 119 | 20 | 21 | 22 |
| NCU07339 | 0.01 | 10 | 204 | 14 | 9 | 0.01 |
| NCU07453 | 53 | 204 | 868 | 205 | 186 | 1016 |
| NCU07897 | 6 | 16 | 123 | 22 | 20 | 12 |
| NCU07979 | 7 | 31 | 196 | 42 | 48 | 17 |
| NCU08043 | 0.01 | 13 | 42 | 8 | 5 | 0.01 |
| NCU08113 | 4 | 4 | 266 | 7 | 32 | 50 |
| NCU08117 | 75 | 35 | 174 | 35 | 56 | 82 |
| NCU08379 | 1330 | 786 | 2359 | 903 | 1094 | 1579 |
| NCU08624 | 11 | 26 | 342 | 35 | 31 | 14 |
| NCU08784 | 8 | 61 | 303 | 48 | 63 | 32 |
| NCU09003 | 201 | 69 | 133 | 75 | 90 | 180 |
| NCU09426 | 0.01 | 29 | 103 | 35 | 50 | 6 |
| NCU09479 | 11 | 21 | 38 | 21 | 19 | 12 |
| NCU09522 | 87 | 46 | 203 | 54 | 51 | 55 |
| NCU09523 | 26 | 27 | 207 | 51 | 34 | 11 |
| NCU09689 | 8 | 105 | 5646 | 112 | 1811 | 1256 |
| NCU10521 | 63 | 103 | 462 | 88 | 108 | 417 |
| NCU11118 | 468 | 125 | 522 | 103 | 150 | 123 |
| NCU11278 | 8 | 65 | 612 | 51 | 49 | 54 |
| NCU11327 | 531 | 538 | 995 | 523 | 510 | 748 |
| NCU11397 | 3483 | 48 | 161 | 56 | 59 | 648 |
| NCU11690 | 26 | 60 | 158 | 46 | 54 | 27 |
| NCU11722 | 471 | 224 | 571 | 251 | 200 | 327 |
| NCU11862 | 13 | 96 | 273 | 69 | 66 | 52 |
| NCU00247 | 27 | 149 | 82 | 225 | 136 | 74 |
| NCU01347 | 98 | 168 | 116 | 220 | 143 | 38 |
| NCU01598 | 4 | 54 | 17 | 40 | 27 | 0.01 |
| NCU03761 | 105 | 144 | 53 | 210 | 77 | 27 |
| NCU04635 | 109 | 863 | 439 | 1494 | 713 | 76 |
| NCU04667 | 9 | 234 | 101 | 338 | 293 | 23 |
| NCU05058 | 5 | 7 | 0.01 | 9 | 7 | 0.01 |
| NCU05128 | 6 | 89 | 50 | 267 | 221 | 18 |
| NCU06265 | 49 | 3080 | 1086 | 2116 | 2448 | 689 |
| NCU06615 | 125 | 1123 | 359 | 1086 | 594 | 209 |
| NCU06895 | 1 | 2463 | 677 | 5512 | 4070 | 38 |
| NCU07233 | 23 | 153 | 120 | 271 | 172 | 38 |
| NCU07423 | 113 | 92 | 53 | 124 | 77 | 41 |
| NCU07424 | 12 | 190 | 94 | 169 | 127 | 32 |
| NCU07895 | 105 | 920 | 343 | 1438 | 853 | 84 |
| NCU08418 | 69 | 561 | 277 | 927 | 642 | 332 |
| NCU08557 | 0.01 | 41 | 12 | 27 | 26 | 22 |
| NCU08712 | 30 | 52 | 21 | 58 | 35 | 18 |
| NCU09060 | 0.01 | 8 | 0.01 | 5 | 0.01 | 0.01 |
| NCU09231 | 17 | 117 | 92 | 163 | 164 | 10 |
| NCU09685 | 0.01 | 60 | 25 | 69 | 31 | 0.01 |
| NCU09958 | 58 | 489 | 205 | 986 | 474 | 47 |
| NCU10276 | 480 | 621 | 390 | 3406 | 2011 | 359 |
| NCU11697 | 34 | 157 | 89 | 231 | 154 | 39 |
| NCU11944 | 23 | 112 | 58 | 104 | 106 | 0.01 |
| NCU12051 | 1 | 175 | 69 | 129 | 123 | 14 |
| NCU12128 | 4 | 105 | 38 | 75 | 83 | 10 |
| NCU12145 | 1 | 25 | 16 | 45 | 34 | 2 |
| NCU00289 | 187 | 105 | 358 | 233 | 174 | 281 |
| NCU00496 | 14 | 15 | 53 | 29 | 30 | 13 |
| NCU00763 | 0.01 | 0.01 | 156 | 1 | 1 | 0.01 |
| NCU01386 | 111 | 69 | 330 | 227 | 130 | 89 |
| NCU02485 | 16 | 30 | 267 | 70 | 117 | 291 |
| NCU02882 | 110 | 16 | 244 | 50 | 64 | 110 |
| NCU04618 | 30 | 35 | 171 | 56 | 80 | 18 |
| NCU04871 | 0.01 | 1 | 20 | 5 | 3 | 2 |
| NCU04904 | 336 | 572 | 1657 | 872 | 880 | 731 |
| NCU05351 | 20 | 14 | 61 | 45 | 26 | 0.01 |
| NCU05501 | 12 | 55 | 470 | 151 | 120 | 128 |
| NCU05906 | 9 | 207 | 501 | 304 | 274 | 340 |
| NCU06373 | 9 | 42 | 228 | 92 | 82 | 12 |
| NCU07270 | 11 | 19 | 62 | 26 | 33 | 49 |
| NCU08116 | 2 | 3 | 15 | 6 | 8 | 0.01 |
| NCU08397 | 12 | 224 | 1466 | 1969 | 617 | 81 |
| NCU08748 | 77 | 71 | 188 | 101 | 116 | 186 |
| NCU08867 | 87 | 17 | 168 | 47 | 42 | 34 |
| NCU09176 | 10 | 63 | 573 | 152 | 198 | 194 |
| NCU11769 | 8 | 6 | 23 | 9 | 12 | 8 |
| NCU11828 | 912 | 76 | 895 | 237 | 210 | 99 |
| NCU11905 | 2 | 3 | 26 | 11 | 8 | 0.01 |
| NCU00011 | 0.01 | 21 | 6 | 11 | 10 | 0.01 |
| NCU00397 | 259 | 1679 | 656 | 890 | 836 | 616 |
| NCU00510 | 3 | 60 | 20 | 30 | 28 | 0.01 |
| NCU00935 | 1326 | 1592 | 327 | 535 | 546 | 924 |
| NCU01880 | 4 | 52 | 17 | 28 | 31 | 0.01 |
| NCU02080 | 318 | 663 | 153 | 347 | 248 | 43 |
| NCU02130 | 35 | 552 | 169 | 311 | 337 | 71 |
| NCU02163 | 10 | 66 | 18 | 33 | 29 | 7 |
| NCU02365 | 0.01 | 46 | 11 | 16 | 20 | 0.01 |
| NCU03157 | 21 | 128 | 41 | 62 | 67 | 42 |
| NCU03352 | 221 | 157 | 70 | 98 | 97 | 70 |
| NCU03398 | 13 | 502 | 241 | 284 | 376 | 67 |
| NCU03570 | 2 | 49 | 9 | 19 | 23 | 0.01 |
| NCU04282 | 4 | 180 | 40 | 83 | 71 | 23 |
| NCU04342 | 279 | 836 | 312 | 553 | 295 | 444 |
| NCU04360 | 91 | 404 | 125 | 232 | 181 | 91 |
| NCU04525 | 157 | 394 | 88 | 174 | 167 | 369 |
| NCU04866 | 26 | 374 | 36 | 149 | 105 | 65 |
| NCU05784 | 8 | 201 | 37 | 72 | 75 | 34 |
| NCU05951 | 4 | 231 | 51 | 89 | 85 | 43 |
| NCU05976 | 3 | 15 | 3 | 7 | 4 | 0.01 |
| NCU06156 | 4 | 272 | 137 | 199 | 194 | 47 |
| NCU06986 | 1777 | 5683 | 1405 | 2505 | 2588 | 2099 |
| NCU07126 | 143 | 143 | 68 | 94 | 79 | 49 |
| NCU07593 | 0.01 | 19 | 3 | 9 | 5 | 0.01 |
| NCU07718 | 0.01 | 1234 | 102 | 379 | 310 | 9 |
| NCU08224 | 482 | 1740 | 423 | 782 | 812 | 3564 |
| NCU08469 | 3 | 864 | 221 | 427 | 452 | 263 |
| NCU08726 | 34 | 225 | 72 | 128 | 124 | 46 |
| NCU09049 | 1 | 115 | 16 | 36 | 31 | 0.01 |
| NCU09115 | 89 | 1644 | 571 | 771 | 869 | 478 |
| NCU09883 | 74 | 551 | 156 | 324 | 288 | 133 |
| NCU10658 | 102 | 303 | 113 | 186 | 169 | 129 |
| NCU10770 | 7 | 21 | 4 | 8 | 8 | 0.01 |
| NCU11294 | 20 | 158 | 32 | 92 | 51 | 101 |
| NCU00304 | 297 | 480 | 1160 | 1340 | 1020 | 820 |
| NCU00798 | 1356 | 182 | 928 | 1074 | 1075 | 1877 |
| NCU01136 | 81 | 36 | 80 | 94 | 95 | 200 |
| NCU01430 | 8 | 92 | 670 | 291 | 316 | 1699 |
| NCU03791 | 4480 | 221 | 524 | 572 | 481 | 1376 |
| NCU04167 | 5 | 19 | 58 | 195 | 131 | 21 |
| NCU04400 | 1 | 78 | 1893 | 963 | 1385 | 2507 |
| NCU04557 | 1 | 2 | 27 | 15 | 13 | 6 |
| NCU04879 | 10 | 0.01 | 11 | 56 | 27 | 0.01 |
| NCU04910 | 1554 | 3082 | 8104 | 6702 | 5873 | 9988 |
| NCU04928 | 16 | 3 | 22 | 18 | 10 | 0.01 |
| NCU05068 | 39 | 39 | 2321 | 1095 | 1569 | 121 |
| NCU05755 | 52 | 123 | 589 | 625 | 629 | 552 |
| NCU05826 | 791 | 25 | 177 | 174 | 157 | 630 |
| NCU05832 | 806 | 544 | 2806 | 1841 | 1558 | 3059 |
| NCU05875 | 4 | 26 | 53 | 77 | 69 | 18 |
| NCU05909 | 3 | 1 | 32 | 16 | 11 | 14 |
| NCU06181 | 85 | 37 | 108 | 88 | 99 | 79 |
| NCU06235 | 326 | 34 | 105 | 115 | 78 | 111 |
| NCU06387 | 77 | 42 | 367 | 199 | 234 | 116 |
| NCU07235 | 4 | 0.01 | 8 | 26 | 20 | 12 |
| NCU07510 | 0.01 | 0.01 | 129 | 129 | 176 | 233 |
| NCU07572 | 59 | 63 | 124 | 243 | 172 | 87 |
| NCU07997 | 161 | 299 | 781 | 976 | 835 | 547 |
| NCU08383 | 0.01 | 1 | 15 | 16 | 16 | 8 |
| NCU08491 | 0.01 | 1254 | 1223 | 1737 | 1330 | 63 |
| NCU08634 | 4 | 28 | 58 | 91 | 78 | 18 |
| NCU09075 | 10 | 0.01 | 6 | 23 | 10 | 0.01 |
| NCU09415 | 84 | 10 | 213 | 86 | 96 | 248 |
| NCU09856 | 6 | 26 | 102 | 103 | 74 | 93 |
| NCU09874 | 306 | 303 | 696 | 4320 | 2036 | 525 |
| NCU09906 | 47 | 38 | 151 | 256 | 206 | 363 |
| NCU10284 | 488 | 46 | 318 | 259 | 154 | 462 |
| NCU10697 | 18 | 20 | 154 | 94 | 129 | 15 |
| NCU11095 | 7 | 8 | 32 | 23 | 24 | 9 |
| NCU11291 | 11 | 9 | 58 | 32 | 29 | 10 |
| NCU11689 | 5 | 3 | 28 | 105 | 72 | 15 |
| NCU11801 | 4 | 5 | 20 | 22 | 21 | 6 |
| NCU11932 | 0.01 | 47 | 342 | 158 | 286 | 419 |
| NCU00365 | 361 | 582 | 249 | 202 | 195 | 339 |
| NCU00375 | 15 | 204 | 42 | 67 | 54 | 26 |
| NCU00755 | 5 | 370 | 39 | 57 | 53 | 15 |
| NCU01109 | 0.01 | 122 | 14 | 23 | 25 | 0.01 |
| NCU01292 | 16 | 26 | 14 | 13 | 12 | 19 |
| NCU01551 | 78 | 423 | 168 | 176 | 193 | 57 |
| NCU01649 | 395 | 416 | 153 | 217 | 170 | 293 |
| NCU03011 | 1 | 98 | 4 | 7 | 4 | 0.01 |
| NCU03417 | 67 | 297 | 88 | 109 | 105 | 41 |
| NCU04285 | 1 | 19 | 5 | 6 | 4 | 0.01 |
| NCU04843 | 546 | 2230 | 885 | 985 | 1378 | 371 |
| NCU04851 | 44 | 91 | 42 | 51 | 50 | 54 |
| NCU04861 | 3 | 61 | 16 | 21 | 22 | 8 |
| NCU04862 | 49 | 668 | 245 | 247 | 294 | 91 |
| NCU05006 | 99 | 1078 | 194 | 211 | 241 | 179 |
| NCU05189 | 8 | 101 | 12 | 17 | 13 | 8 |
| NCU05197 | 71 | 51 | 42 | 42 | 36 | 24 |
| NCU05477 | 17 | 60 | 18 | 12 | 12 | 16 |
| NCU05762 | 0.01 | 13 | 0.01 | 0.01 | 0.01 | 0.01 |
| NCU05764 | 0.01 | 11 | 0.01 | 0.01 | 0.01 | 0.01 |
| NCU05766 | 0.01 | 119 | 32 | 39 | 44 | 16 |
| NCU05859 | 1 | 34 | 9 | 4 | 6 | 4 |
| NCU05933 | 4 | 59 | 27 | 30 | 31 | 6 |
| NCU06334 | 50 | 529 | 158 | 140 | 155 | 42 |
| NCU07180 | 5 | 44 | 18 | 21 | 21 | 6 |
| NCU07363 | 1208 | 5311 | 1592 | 2150 | 2283 | 1156 |
| NCU08037 | 5 | 924 | 227 | 209 | 290 | 8 |
| NCU08155 | 77 | 1590 | 216 | 354 | 221 | 192 |
| NCU08156 | 13 | 275 | 43 | 45 | 40 | 23 |
| NCU08170 | 7 | 33 | 16 | 15 | 14 | 21 |
| NCU08455 | 20 | 1198 | 153 | 230 | 290 | 50 |
| NCU08554 | 899 | 3675 | 1509 | 1940 | 1750 | 838 |
| NCU08622 | 0.01 | 40 | 14 | 17 | 19 | 0.01 |
| NCU08700 | 28 | 116 | 51 | 45 | 48 | 80 |
| NCU08775 | 12 | 197 | 60 | 54 | 48 | 13 |
| NCU09272 | 16 | 394 | 68 | 68 | 78 | 25 |
| NCU09273 | 45 | 800 | 106 | 76 | 92 | 53 |
| NCU09274 | 31 | 1352 | 109 | 93 | 117 | 36 |
| NCU09335 | 15 | 448 | 133 | 151 | 213 | 50 |
| NCU09342 | 3 | 18 | 2 | 3 | 2 | 0.01 |
| NCU09714 | 10 | 256 | 119 | 136 | 130 | 82 |
| NCU09782 | 113 | 736 | 273 | 286 | 384 | 124 |
| NCU10062 | 305 | 169 | 71 | 81 | 91 | 86 |
| NCU10301 | 7 | 103 | 51 | 65 | 42 | 36 |
| NCU11565 | 29 | 89 | 64 | 56 | 60 | 23 |
| NCU11774 | 1744 | 31112 | 14608 | 17568 | 17970 | 5816 |
| NCU11881 | 72 | 587 | 201 | 227 | 263 | 133 |
| NCU11974 | 603 | 8076 | 1100 | 1707 | 1525 | 288 |
| NCU11989 | 36 | 812 | 234 | 272 | 343 | 76 |
| NCU12012 | 0.01 | 7 | 0.01 | 0.01 | 0.01 | 0.01 |
| NCU12014 | 0.01 | 6 | 0.01 | 0.01 | 0.01 | 0.01 |
| NCU12015 | 0.01 | 6 | 0.01 | 0.01 | 0.01 | 0.01 |

TABLE 1D
Differential expression (DE) patterns between
various mutant strains and growth conditions*

| | Avicel v | Avicel v | Avicel v | Sucrose v | Avicel v |
|---|---|---|---|---|---|
| | No Car- | Δclr-1 | Δclr-2 | No Car- | Sucrose |
| Gene | bon DE | DE | DE | bon DE | DE |
| NCU00554 | yes | yes | yes | yes | yes |
| NCU00944 | cuffdiff | yes | cuffdiff | | cuffdiff |
| NCU01195 | cuffdiff | yes | yes | yes | yes |
| NCU02785 | yes | cuffdiff | cuffdiff | yes | yes |
| NCU02954 | cuffdiff | cuffdiff | yes | yes | yes |
| NCU03131 | yes | cuffdiff | cuffdiff | cuffdiff | cuffdiff |
| NCU04216 | cuffdiff | yes | yes | yes | yes |
| NCU04298 | yes | cuffdiff | cuffdiff | yes | yes |
| NCU04837 | cuffdiff | yes | cuffdiff | yes | yes |
| NCU05548 | yes | yes | yes | yes | cuffdiff |
| NCU07413 | yes | yes | yes | cuffdiff | cuffdiff |
| NCU10283 | yes | yes | yes | yes | cuffdiff |
| NCU00461 | cuffdiff | yes | cuffdiff | yes | yes |
| NCU00591 | yes | yes | yes | yes | yes |
| NCU00680 | yes | yes | cuffdiff | cuffdiff | cuffdiff |
| NCU01402 | cuffdiff | yes | yes | yes | yes |
| NCU02127 | yes | yes | yes | yes | yes |
| NCU02704 | cuffdiff | yes | yes | yes | yes |
| NCU02727 | cuffdiff | yes | cuffdiff | cuffdiff | cuffdiff |
| NCU02936 | yes | yes | yes | yes | cuffdiff |
| NCU03076 | cuffdiff | yes | yes | cuffdiff | |
| NCU03415 | yes | yes | cuffdiff | yes | yes |
| NCU03648 | cuffdiff | yes | yes | yes | yes |
| NCU03913 | cuffdiff | yes | yes | yes | cuffdiff |
| NCU05499 | cuffdiff | yes | yes | yes | yes |
| NCU05537 | cuffdiff | yes | yes | yes | yes |
| NCU05977 | yes | yes | yes | yes | yes |
| NCU06448 | cuffdiff | yes | cuffdiff | cuffdiff | |
| NCU06543 | cuffdiff | yes | cuffdiff | yes | cuffdiff |
| NCU07153 | cuffdiff | yes | cuffdiff | cuffdiff | cuffdiff |
| NCU08216 | cuffdiff | yes | yes | cuffdiff | yes |
| NCU09116 | yes | yes | yes | cuffdiff | yes |
| NCU09266 | cuffdiff | yes | cuffdiff | yes | yes |
| NCU09864 | cuffdiff | yes | yes | yes | yes |
| NCU11195 | yes | cuffdiff | cuffdiff | yes | cuffdiff |
| NCU01830 | cuffdiff | cuffdiff | yes | yes | yes |
| NCU02126 | yes | yes | yes | yes | yes |
| NCU01744 | yes | cuffdiff | cuffdiff | yes | cuffdiff |
| NCU03748 | yes | cuffdiff | cuffdiff | yes | yes |
| NCU06625 | yes | cuffdiff | cuffdiff | yes | |
| NCU04130 | yes | cuffdiff | cuffdiff | cuffdiff | yes |
| NCU10110 | yes | cuffdiff | cuffdiff | yes | yes |
| NCU03861 | yes | | | yes | |
| NCU07623 | yes | | | yes | yes |
| NCU01427 | yes | | cuffdiff | yes | yes |
| NCU03651 | yes | cuffdiff | yes | yes | cuffdiff |
| NCU02579 | yes | cuffdiff | cuffdiff | yes | yes |
| NCU07307 | yes | | | yes | yes |
| NCU07308 | yes | | | yes | yes |
| NCU05858 | yes | | | yes | yes |
| NCU01013 | yes | yes | yes | cuffdiff | cuffdiff |
| NCU06189 | yes | cuffdiff | cuffdiff | yes | yes |
| NCU05165 | cuffdiff | yes | cuffdiff | cuffdiff | cuffdiff |
| NCU04865 | yes | | cuffdiff | yes | cuffdiff |
| NCU05011 | yes | | | | yes |
| NCU00762 | yes | yes | yes | | yes |
| NCU00836 | yes | yes | yes | | yes |
| NCU01050 | yes | yes | yes | cuffdiff | yes |
| NCU02240 | yes | yes | yes | yes | yes |
| NCU02344 | yes | yes | yes | yes | cuffdiff |
| NCU02916 | yes | yes | yes | | yes |
| NCU03328 | yes | yes | yes | yes | yes |
| NCU04854 | yes | yes | yes | yes | yes |
| NCU05057 | yes | yes | yes | yes | yes |
| NCU05121 | yes | yes | yes | yes | yes |
| NCU07190 | yes | yes | yes | cuffdiff | yes |
| NCU07340 | yes | yes | yes | cuffdiff | yes |
| NCU07760 | yes | yes | yes | yes | cuffdiff |
| NCU07898 | yes | yes | yes | yes | yes |
| NCU08760 | yes | yes | yes | | yes |
| NCU09680 | yes | yes | yes | | yes |
| NCU03322 | yes | cuffdiff | cuffdiff | yes | yes |
| NCU07362 | yes | cuffdiff | cuffdiff | yes | cuffdiff |
| NCU03813 | yes | cuffdiff | cuffdiff | yes | yes |
| NCU04539 | yes | | | yes | yes |
| NCU08687 | yes | yes | yes | cuffdiff | yes |
| NCU05133 | yes | cuffdiff | cuffdiff | yes | cuffdiff |
| NCU09705 | yes | cuffdiff | cuffdiff | yes | yes |
| NCU07277 | yes | cuffdiff | cuffdiff | cuffdiff | cuffdiff |
| NCU04797 | yes | yes | cuffdiff | yes | cuffdiff |
| NCU00575 | yes | cuffdiff | cuffdiff | yes | |
| NCU04401 | yes | cuffdiff | cuffdiff | yes | yes |
| NCU02855 | yes | yes | yes | | yes |
| NCU05924 | yes | yes | yes | | yes |
| NCU05955 | yes | yes | yes | yes | yes |
| NCU07326 | yes | yes | yes | yes | yes |
| NCU09775 | yes | cuffdiff | yes | cuffdiff | yes |
| NCU04997 | yes | yes | yes | | yes |
| NCU01900 | yes | cuffdiff | cuffdiff | yes | yes |
| NCU02343 | yes | cuffdiff | cuffdiff | yes | yes |
| NCU07225 | yes | yes | yes | cuffdiff | yes |
| NCU08087 | yes | cuffdiff | cuffdiff | yes | cuffdiff |
| NCU08189 | yes | | cuffdiff | yes | yes |
| NCU09652 | yes | | cuffdiff | yes | yes |
| NCU06881 | cuffdiff | yes | cuffdiff | | cuffdiff |
| NCU01853 | cuffdiff | yes | yes | yes | yes |
| NCU02287 | cuffdiff | yes | cuffdiff | yes | cuffdiff |
| NCU02894 | yes | cuffdiff | cuffdiff | cuffdiff | |
| NCU07263 | yes | yes | cuffdiff | | yes |
| NCU08924 | yes | cuffdiff | cuffdiff | yes | yes |
| NCU09692 | yes | cuffdiff | cuffdiff | yes | yes |
| NCU04796 | yes | cuffdiff | cuffdiff | yes | yes |
| NCU09732 | cuffdiff | yes | cuffdiff | yes | cuffdiff |
| NCU07719 | yes | cuffdiff | cuffdiff | cuffdiff | cuffdiff |
| NCU12093 | yes | yes | cuffdiff | yes | yes |
| NCU05818 | yes | | | yes | yes |
| NCU04078 | yes | yes | yes | yes | yes |
| NCU07617 | yes | | | yes | cuffdiff |
| NCU08398 | yes | yes | yes | yes | yes |
| NCU10683 | cuffdiff | cuffdiff | yes | yes | yes |
| NCU10063 | yes | | | yes | cuffdiff |
| NCU04933 | yes | cuffdiff | cuffdiff | | cuffdiff |
| NCU00890 | yes | yes | yes | yes | yes |
| NCU04623 | yes | yes | cuffdiff | yes | yes |
| NCU04952 | yes | yes | yes | yes | yes |
| NCU05956 | cuffdiff | yes | cuffdiff | yes | yes |
| NCU07487 | yes | yes | yes | | yes |
| NCU08755 | yes | yes | cuffdiff | yes | yes |
| NCU00130 | yes | yes | yes | yes | yes |
| NCU00709 | yes | cuffdiff | cuffdiff | | yes |
| NCU04168 | yes | yes | cuffdiff | yes | yes |
| NCU09904 | yes | cuffdiff | | | yes |
| NCU09923 | yes | cuffdiff | cuffdiff | yes | yes |
| NCU03098 | yes | | cuffdiff | yes | yes |
| NCU09028 | yes | | | yes | cuffdiff |
| NCU09281 | yes | cuffdiff | cuffdiff | yes | yes |
| NCU10107 | yes | cuffdiff | cuffdiff | yes | yes |
| NCU00206 | yes | yes | yes | | yes |
| NCU00710 | yes | yes | yes | | yes |
| NCU01059 | yes | yes | cuffdiff | | yes |
| NCU03181 | yes | yes | yes | yes | yes |
| NCU04494 | yes | yes | yes | | yes |
| NCU05598 | yes | yes | yes | cuffdiff | cuffdiff |
| NCU05751 | yes | yes | yes | | yes |
| NCU08176 | yes | yes | yes | | yes |
| NCU08746 | yes | yes | yes | yes | yes |
| NCU08785 | yes | yes | yes | yes | yes |
| NCU09445 | yes | yes | yes | cuffdiff | yes |
| NCU09491 | yes | yes | yes | yes | yes |
| NCU09582 | yes | yes | yes | | yes |
| NCU09764 | yes | yes | yes | yes | yes |
| NCU09774 | yes | yes | yes | | yes |
| NCU09976 | yes | yes | yes | | yes |
| NCU10045 | yes | yes | yes | cuffdiff | yes |
| NCU11068 | yes | yes | yes | yes | yes |
| NCU11198 | yes | yes | yes | | yes |
| NCU02904 | yes | cuffdiff | cuffdiff | yes | |
| NCU04870 | yes | yes | yes | | yes |
| NCU05159 | yes | yes | yes | yes | yes |
| NCU09518 | yes | cuffdiff | cuffdiff | yes | yes |
| NCU09664 | yes | yes | yes | | yes |
| NCU09924 | yes | yes | yes | yes | yes |
| NCU03158 | yes | | | cuffdiff | cuffdiff |
| NCU07067 | yes | cuffdiff | cuffdiff | yes | yes |
| NCU01353 | yes | cuffdiff | cuffdiff | yes | cuffdiff |
| NCU07269 | yes | | | yes | yes |
| NCU06023 | yes | | | yes | |
| NCU06025 | yes | | | cuffdiff | |
| NCU00761 | yes | yes | yes | | yes |
| NCU06650 | cuffdiff | cuffdiff | yes | yes | yes |
| NCU09416 | yes | yes | yes | cuffdiff | yes |
| NCU00292 | yes | | cuffdiff | yes | yes |
| NCU03903 | yes | cuffdiff | cuffdiff | yes | yes |
| NCU04475 | yes | cuffdiff | cuffdiff | yes | yes |
| NCU06364 | yes | cuffdiff | cuffdiff | cuffdiff | cuffdiff |
| NCU09575 | yes | | | yes | yes |
| NCU04230 | yes | yes | cuffdiff | yes | cuffdiff |
| NCU02366 | yes | | | yes | cuffdiff |
| NCU04280 | yes | | | yes | yes |
| NCU04385 | yes | | | yes | yes |
| NCU02969 | yes | | | cuffdiff | yes |
| NCU08164 | yes | cuffdiff | cuffdiff | cuffdiff | yes |
| NCU00891 | yes | | cuffdiff | cuffdiff | yes |
| NCU08384 | yes | cuffdiff | | | yes |
| NCU08272 | cuffdiff | yes | cuffdiff | cuffdiff | |
| NCU07619 | yes | | | yes | |
| NCU05304 | yes | yes | cuffdiff | yes | yes |
| NCU01510 | yes | cuffdiff | cuffdiff | yes | yes |
| NCU05768 | yes | cuffdiff | | yes | cuffdiff |
| NCU07154 | yes | cuffdiff | cuffdiff | yes | yes |
| NCU01998 | yes | | cuffdiff | yes | cuffdiff |
| NCU08457 | yes | cuffdiff | cuffdiff | yes | yes |
| NCU06386 | yes | cuffdiff | cuffdiff | | cuffdiff |
| NCU09425 | yes | cuffdiff | cuffdiff | yes | yes |
| NCU02478 | yes | cuffdiff | | yes | cuffdiff |
| NCU09175 | yes | cuffdiff | cuffdiff | cuffdiff | yes |
| NCU01689 | cuffdiff | yes | cuffdiff | yes | yes |
| NCU11721 | cuffdiff | yes | yes | cuffdiff | cuffdiff |
| NCU02396 | yes | cuffdiff | | cuffdiff | yes |
| NCU07481 | yes | | | yes | |
| NCU03137 | yes | cuffdiff | cuffdiff | cuffdiff | |
| NCU02500 | cuffdiff | yes | yes | yes | yes |
| NCU00565 | yes | yes | cuffdiff | cuffdiff | yes |
| NCU02705 | cuffdiff | yes | yes | yes | yes |
| NCU05225 | yes | | | cuffdiff | cuffdiff |
| NCU08326 | cuffdiff | yes | | cuffdiff | cuffdiff |
| NCU00326 | yes | yes | yes | cuffdiff | yes |
| NCU08691 | yes | | | yes | yes |
| NCU09043 | yes | cuffdiff | cuffdiff | yes | yes |
| NCU07432 | yes | cuffdiff | cuffdiff | | cuffdiff |
| NCU05841 | yes | cuffdiff | yes | yes | cuffdiff |
| NCU02361 | cuffdiff | yes | cuffdiff | | |
| NCU10051 | yes | cuffdiff | cuffdiff | yes | cuffdiff |
| NCU04720 | yes | cuffdiff | cuffdiff | yes | cuffdiff |
| NCU04698 | yes | cuffdiff | cuffdiff | yes | cuffdiff |
| NCU00177 | cuffdiff | yes | cuffdiff | yes | yes |
| NCU01786 | cuffdiff | yes | cuffdiff | yes | cuffdiff |
| NCU03117 | cuffdiff | yes | yes | yes | yes |
| NCU05254 | cuffdiff | yes | cuffdiff | yes | cuffdiff |
| NCU03963 | yes | yes | yes | yes | yes |
| NCU09659 | cuffdiff | yes | cuffdiff | yes | yes |
| NCU03488 | yes | cuffdiff | cuffdiff | cuffdiff | yes |
| NCU02657 | yes | cuffdiff | cuffdiff | yes | yes |
| NCU05855 | yes | yes | yes | | yes |
| NCU08044 | yes | cuffdiff | yes | | yes |
| NCU09283 | cuffdiff | yes | cuffdiff | yes | yes |
| NCU11243 | cuffdiff | yes | yes | yes | yes |
| NCU01378 | yes | cuffdiff | cuffdiff | yes | cuffdiff |
| NCU01861 | yes | yes | yes | yes | yes |
| NCU04583 | cuffdiff | yes | yes | cuffdiff | cuffdiff |
| NCU06616 | yes | yes | cuffdiff | yes | yes |
| NCU07325 | yes | cuffdiff | cuffdiff | yes | yes |
| NCU08771 | yes | yes | cuffdiff | yes | yes |
| NCU09553 | cuffdiff | yes | cuffdiff | cuffdiff | |
| NCU10055 | cuffdiff | yes | yes | yes | yes |
| NCU11289 | yes | | | yes | |
| NCU08750 | yes | yes | cuffdiff | yes | yes |
| NCU08752 | yes | yes | cuffdiff | yes | yes |
| NCU03049 | yes | | | yes | yes |
| NCU05653 | yes | | | | yes |
| NCU07133 | yes | cuffdiff | cuffdiff | yes | yes |
| NCU08925 | yes | cuffdiff | | yes | |
| NCU09865 | yes | | | yes | |
| NCU11365 | yes | cuffdiff | | cuffdiff | |
| NCU07055 | yes | cuffdiff | cuffdiff | yes | yes |
| NCU07224 | yes | yes | yes | | yes |
| NCU01061 | yes | | | yes | |
| NCU03566 | yes | | | yes | cuffdiff |
| NCU04260 | yes | | cuffdiff | yes | yes |
| NCU05094 | yes | | cuffdiff | yes | yes |
| NCU05986 | yes | | | yes | cuffdiff |
| NCU06153 | yes | cuffdiff | cuffdiff | yes | yes |
| NCU09674 | yes | | | cuffdiff | cuffdiff |
| NCU11241 | yes | cuffdiff | cuffdiff | yes | cuffdiff |
| NCU03013 | yes | cuffdiff | cuffdiff | yes | yes |
| NCU05319 | yes | cuffdiff | cuffdiff | yes | |
| NCU04430 | cuffdiff | yes | yes | yes | yes |
| NCU02059 | yes | yes | yes | yes | cuffdiff |
| NCU00831 | cuffdiff | yes | cuffdiff | yes | cuffdiff |
| NCU06055 | yes | cuffdiff | cuffdiff | | cuffdiff |
| NCU00263 | cuffdiff | yes | cuffdiff | cuffdiff | cuffdiff |
| NCU07200 | cuffdiff | yes | cuffdiff | cuffdiff | cuffdiff |
| NCU09992 | cuffdiff | yes | cuffdiff | yes | yes |
| NCU09265 | yes | yes | yes | cuffdiff | yes |
| NCU00813 | yes | yes | yes | cuffdiff | yes |
| NCU02455 | yes | cuffdiff | cuffdiff | | yes |
| NCU09223 | yes | yes | yes | cuffdiff | yes |
| NCU09485 | yes | yes | yes | cuffdiff | cuffdiff |
| NCU01648 | yes | cuffdiff | cuffdiff | yes | cuffdiff |
| NCU10497 | yes | yes | cuffdiff | cuffdiff | cuffdiff |
| NCU00669 | yes | yes | cuffdiff | cuffdiff | cuffdiff |
| NCU02118 | yes | cuffdiff | cuffdiff | cuffdiff | |
| NCU10762 | yes | cuffdiff | cuffdiff | yes | |
| NCU00244 | yes | | | cuffdiff | cuffdiff |
| NCU01068 | yes | cuffdiff | cuffdiff | yes | yes |
| NCU03319 | yes | cuffdiff | cuffdiff | | yes |
| NCU08761 | yes | yes | cuffdiff | cuffdiff | cuffdiff |
| NCU01279 | yes | cuffdiff | cuffdiff | cuffdiff | cuffdiff |
| NCU03819 | yes | cuffdiff | cuffdiff | cuffdiff | cuffdiff |
| NCU08607 | yes | cuffdiff | cuffdiff | | cuffdiff |
| NCU09195 | yes | cuffdiff | cuffdiff | cuffdiff | |
| NCU07736 | yes | cuffdiff | cuffdiff | yes | cuffdiff |
| NCU01290 | cuffdiff | yes | cuffdiff | yes | yes |
| NCU03396 | cuffdiff | yes | cuffdiff | yes | yes |
| NCU09521 | cuffdiff | yes | yes | yes | yes |
| NCU03897 | cuffdiff | yes | cuffdiff | yes | cuffdiff |
| NCU07746 | yes | cuffdiff | cuffdiff | cuffdiff | cuffdiff |
| NCU08897 | yes | yes | yes | cuffdiff | cuffdiff |
| NCU00169 | yes | yes | yes | cuffdiff | cuffdiff |
| NCU02681 | yes | cuffdiff | yes | cuffdiff | cuffdiff |
| NCU06333 | yes | yes | yes | cuffdiff | yes |
| NCU01146 | yes | cuffdiff | cuffdiff | yes | cuffdiff |
| NCU00931 | yes | | | yes | yes |
| NCU07008 | yes | | | yes | cuffdiff |
| NCU03295 | cuffdiff | yes | cuffdiff | yes | yes |
| NCU07737 | yes | yes | cuffdiff | cuffdiff | cuffdiff |
| NCU08038 | yes | cuffdiff | cuffdiff | yes | yes |
| NCU02729 | cuffdiff | yes | cuffdiff | yes | yes |
| NCU03364 | cuffdiff | yes | cuffdiff | yes | yes |
| NCU03817 | yes | | | cuffdiff | |
| NCU06111 | yes | | | cuffdiff | yes |
| NCU08115 | yes | yes | cuffdiff | | yes |
| NCU06931 | cuffdiff | yes | cuffdiff | yes | yes |
| NCU04077 | yes | cuffdiff | cuffdiff | yes | yes |
| NCU01862 | yes | cuffdiff | cuffdiff | yes | yes |
| NCU02795 | yes | | | yes | |
| NCU00812 | cuffdiff | yes | cuffdiff | yes | cuffdiff |
| NCU01856 | yes | yes | yes | cuffdiff | cuffdiff |
| NCU03725 | yes | yes | yes | yes | cuffdiff |
| NCU06971 | yes | yes | yes | yes | yes |
| NCU07705 | yes | yes | cuffdiff | yes | yes |
| NCU08042 | yes | yes | yes | | yes |
| NCU03643 | yes | yes | yes | yes | yes |
| NCU03043 | yes | cuffdiff | cuffdiff | yes | cuffdiff |
| NCU05767 | yes | | | yes | yes |
| NCU00316 | cuffdiff | yes | cuffdiff | cuffdiff | |
| NCU00721 | cuffdiff | yes | yes | yes | cuffdiff |
| NCU07578 | cuffdiff | yes | cuffdiff | yes | yes |
| NCU04435 | yes | | | | |
| NCU05198 | yes | | | cuffdiff | yes |
| NCU10721 | yes | yes | yes | | yes |
| NCU11342 | yes | yes | yes | yes | yes |
| NCU00821 | cuffdiff | yes | cuffdiff | yes | cuffdiff |
| NCU08561 | yes | yes | cuffdiff | yes | cuffdiff |
| NCU09287 | cuffdiff | yes | cuffdiff | yes | yes |
| NCU00801 | yes | yes | yes | yes | yes |
| NCU00809 | yes | cuffdiff | cuffdiff | cuffdiff | yes |
| NCU07668 | yes | cuffdiff | cuffdiff | | yes |
| NCU05089 | yes | | | cuffdiff | yes |
| NCU08152 | yes | cuffdiff | cuffdiff | yes | yes |
| NCU01633 | cuffdiff | yes | cuffdiff | yes | yes |
| NCU04537 | yes | cuffdiff | cuffdiff | | yes |
| NCU05853 | yes | cuffdiff | cuffdiff | yes | yes |
| NCU08114 | yes | yes | cuffdiff | yes | yes |
| NCU00023 | cuffdiff | yes | yes | cuffdiff | yes |
| NCU02009 | yes | yes | yes | cuffdiff | yes |
| NCU07068 | yes | cuffdiff | cuffdiff | yes | yes |
| NCU03305 | yes | cuffdiff | cuffdiff | cuffdiff | cuffdiff |
| NCU08225 | yes | cuffdiff | cuffdiff | yes | yes |
| NCU08147 | yes | cuffdiff | cuffdiff | yes | yes |
| NCU06366 | yes | | | cuffdiff | cuffdiff |
| NCU05585 | yes | cuffdiff | cuffdiff | yes | yes |
| NCU06138 | yes | cuffdiff | cuffdiff | yes | yes |
| NCU05591 | yes | cuffdiff | | | yes |
| NCU06032 | yes | yes | yes | cuffdiff | yes |
| NCU09098 | yes | yes | yes | | yes |
| NCU10009 | yes | cuffdiff | cuffdiff | cuffdiff | |
| NCU00290 | yes | yes | cuffdiff | yes | yes |
| NCU09580 | yes | yes | | yes | |
| NCU00803 | yes | | | yes | yes |
| NCU04374 | yes | | cuffdiff | yes | cuffdiff |
| NCU08425 | yes | yes | yes | yes | cuffdiff |
| NCU04097 | cuffdiff | yes | cuffdiff | yes | yes |
| NCU05079 | cuffdiff | yes | cuffdiff | cuffdiff | cuffdiff |
| NCU07546 | yes | cuffdiff | cuffdiff | | yes |
| NCU08148 | cuffdiff | yes | | yes | cuffdiff |
| NCU03107 | yes | | | yes | |
| NCU00586 | yes | yes | yes | yes | cuffdiff |
| NCU00716 | cuffdiff | yes | | yes | cuffdiff |
| NCU00025 | yes | cuffdiff | cuffdiff | yes | yes |
| NCU00848 | yes | | | yes | yes |
| NCU00449 | yes | yes | yes | cuffdiff | yes |
| NCU00849 | yes | | cuffdiff | yes | |
| NCU01058 | yes | yes | cuffdiff | yes | yes |
| NCU01076 | yes | yes | yes | cuffdiff | yes |
| NCU01196 | cuffdiff | cuffdiff | yes | | cuffdiff |
| NCU01978 | cuffdiff | yes | cuffdiff | | yes |
| NCU02138 | cuffdiff | yes | yes | cuffdiff | cuffdiff |
| NCU03083 | yes | yes | yes | yes | cuffdiff |
| NCU03982 | yes | yes | yes | cuffdiff | yes |
| NCU04948 | yes | yes | cuffdiff | yes | yes |
| NCU05230 | yes | yes | cuffdiff | | yes |
| NCU05863 | yes | yes | yes | yes | yes |
| NCU05864 | yes | yes | yes | yes | yes |
| NCU06152 | cuffdiff | yes | cuffdiff | yes | yes |
| NCU06607 | yes | yes | yes | cuffdiff | yes |
| NCU08756 | yes | yes | yes | | yes |
| NCU08790 | yes | yes | yes | | yes |
| NCU09295 | yes | yes | cuffdiff | yes | |
| NCU09524 | yes | yes | yes | yes | yes |
| NCU11268 | yes | yes | cuffdiff | yes | yes |
| NCU11542 | yes | yes | yes | yes | yes |
| NCU11753 | cuffdiff | yes | yes | | cuffdiff |
| NCU00175 | yes | yes | yes | yes | yes |
| NCU00250 | yes | yes | cuffdiff | yes | yes |
| NCU00322 | cuffdiff | yes | cuffdiff | cuffdiff | cuffdiff |
| NCU00695 | cuffdiff | yes | yes | yes | yes |
| NCU07311 | yes | yes | yes | yes | yes |
| NCU08171 | yes | yes | cuffdiff | cuffdiff | cuffdiff |
| NCU08521 | yes | | | yes | cuffdiff |
| NCU10507 | yes | cuffdiff | cuffdiff | yes | yes |
| NCU07143 | yes | yes | yes | cuffdiff | yes |
| NCU07222 | yes | yes | yes | yes | cuffdiff |
| NCU08371 | yes | cuffdiff | cuffdiff | yes | yes |
| NCU09506 | yes | cuffdiff | yes | yes | yes |
| NCU04106 | yes | cuffdiff | cuffdiff | | yes |
| NCU06526 | yes | cuffdiff | cuffdiff | yes | yes |
| NCU09196 | yes | | cuffdiff | yes | yes |
| NCU11466 | yes | cuffdiff | cuffdiff | yes | yes |
| NCU11957 | yes | | | yes | cuffdiff |
| NCU00995 | cuffdiff | yes | cuffdiff | yes | cuffdiff |
| NCU01720 | yes | | | yes | yes |
| NCU03293 | yes | cuffdiff | cuffdiff | yes | yes |
| NCU04169 | yes | cuffdiff | cuffdiff | yes | yes |
| NCU04170 | yes | cuffdiff | cuffdiff | yes | yes |
| NCU04467 | yes | | cuffdiff | | yes |
| NCU04932 | yes | cuffdiff | cuffdiff | cuffdiff | cuffdiff |
| NCU04998 | yes | | | | cuffdiff |
| NCU05134 | yes | cuffdiff | cuffdiff | yes | cuffdiff |
| NCU05350 | yes | cuffdiff | | yes | yes |
| NCU05829 | yes | | | yes | yes |
| NCU05852 | yes | | | yes | yes |
| NCU05908 | yes | | cuffdiff | | yes |
| NCU06143 | yes | cuffdiff | cuffdiff | yes | yes |
| NCU06983 | yes | cuffdiff | cuffdiff | yes | |
| NCU06991 | yes | | | yes | |
| NCU08635 | yes | | | yes | yes |
| NCU09046 | cuffdiff | yes | cuffdiff | yes | cuffdiff |
| NCU09172 | yes | | | | yes |
| NCU09424 | yes | | | yes | yes |
| NCU09498 | yes | cuffdiff | cuffdiff | yes | cuffdiff |
| NCU09823 | yes | yes | cuffdiff | cuffdiff | yes |
| NCU09848 | yes | | | yes | cuffdiff |
| NCU10014 | yes | cuffdiff | cuffdiff | yes | cuffdiff |
| NCU10039 | yes | cuffdiff | cuffdiff | yes | yes |
| NCU10687 | yes | | | yes | cuffdiff |
| NCU00561 | yes | cuffdiff | cuffdiff | yes | yes |
| NCU00859 | yes | cuffdiff | | yes | yes |
| NCU02042 | cuffdiff | yes | cuffdiff | cuffdiff | cuffdiff |
| NCU02164 | yes | cuffdiff | cuffdiff | yes | cuffdiff |
| NCU04482 | yes | | | yes | |
| NCU04486 | yes | | | yes | yes |
| NCU05236 | yes | | | yes | yes |
| NCU05761 | yes | | | yes | |
| NCU05763 | yes | | | yes | |
| NCU06328 | yes | cuffdiff | cuffdiff | yes | cuffdiff |
| NCU07948 | yes | | | yes | yes |
| NCU08140 | yes | | | yes | |
| NCU08447 | yes | | | yes | yes |
| NCU09734 | yes | | | yes | |
| NCU12011 | yes | | | yes | cuffdiff |
| NCU00408 | cuffdiff | yes | yes | yes | cuffdiff |
| NCU00633 | yes | yes | cuffdiff | yes | cuffdiff |
| NCU00870 | yes | yes | yes | cuffdiff | yes |
| NCU00871 | yes | yes | yes | cuffdiff | yes |
| NCU00965 | yes | yes | yes | | yes |
| NCU01003 | yes | cuffdiff | cuffdiff | cuffdiff | cuffdiff |
| NCU01049 | yes | yes | yes | | yes |
| NCU01077 | yes | yes | yes | | yes |
| NCU01148 | yes | yes | yes | | yes |
| NCU01944 | yes | yes | yes | yes | yes |
| NCU01970 | cuffdiff | yes | yes | yes | yes |
| NCU01983 | yes | yes | yes | yes | yes |
| NCU02008 | cuffdiff | yes | yes | | yes |
| NCU02061 | yes | yes | yes | | cuffdiff |
| NCU02600 | yes | yes | yes | | yes |
| NCU02625 | yes | yes | yes | cuffdiff | yes |
| NCU02720 | cuffdiff | yes | cuffdiff | yes | cuffdiff |
| NCU02915 | yes | yes | yes | yes | yes |
| NCU03152 | yes | yes | yes | yes | |
| NCU03329 | yes | yes | yes | yes | yes |
| NCU03433 | yes | yes | yes | | cuffdiff |
| NCU04127 | yes | yes | yes | cuffdiff | cuffdiff |
| NCU04522 | yes | yes | yes | cuffdiff | yes |
| NCU04830 | yes | cuffdiff | cuffdiff | yes | cuffdiff |
| NCU04905 | yes | cuffdiff | yes | | yes |
| NCU05056 | yes | yes | yes | | yes |
| NCU05170 | yes | cuffdiff | yes | | cuffdiff |
| NCU05569 | cuffdiff | yes | yes | cuffdiff | |
| NCU05574 | yes | yes | yes | yes | yes |
| NCU05846 | yes | yes | yes | yes | yes |
| NCU05848 | yes | yes | yes | cuffdiff | yes |
| NCU05854 | yes | cuffdiff | cuffdiff | yes | yes |
| NCU06214 | cuffdiff | yes | cuffdiff | cuffdiff | cuffdiff |
| NCU06312 | cuffdiff | yes | cuffdiff | yes | yes |
| NCU06704 | yes | yes | yes | cuffdiff | cuffdiff |
| NCU07207 | cuffdiff | yes | yes | yes | yes |
| NCU07336 | yes | yes | yes | | yes |
| NCU07339 | yes | yes | yes | yes | yes |
| NCU07453 | yes | yes | yes | yes | yes |
| NCU07897 | yes | yes | yes | cuffdiff | yes |
| NCU07979 | yes | yes | yes | yes | yes |
| NCU08043 | yes | yes | yes | yes | yes |
| NCU08113 | yes | yes | yes | | yes |
| NCU08117 | yes | yes | yes | cuffdiff | cuffdiff |
| NCU08379 | yes | yes | yes | cuffdiff | cuffdiff |
| NCU08624 | yes | yes | yes | cuffdiff | yes |
| NCU08784 | yes | yes | cuffdiff | yes | yes |
| NCU09003 | yes | cuffdiff | cuffdiff | yes | cuffdiff |
| NCU09426 | yes | yes | cuffdiff | yes | yes |
| NCU09479 | cuffdiff | cuffdiff | yes | | yes |
| NCU09522 | yes | yes | yes | cuffdiff | cuffdiff |
| NCU09523 | yes | yes | yes | | yes |
| NCU09689 | yes | yes | yes | yes | yes |
| NCU10521 | yes | yes | yes | | cuffdiff |
| NCU11118 | yes | yes | yes | cuffdiff | |
| NCU11278 | yes | yes | yes | yes | yes |
| NCU11327 | cuffdiff | cuffdiff | yes | | cuffdiff |
| NCU11397 | yes | yes | yes | yes | yes |
| NCU11690 | yes | yes | yes | cuffdiff | yes |
| NCU11722 | yes | yes | yes | yes | cuffdiff |
| NCU11862 | cuffdiff | yes | yes | yes | yes |
| NCU00247 | cuffdiff | yes | cuffdiff | yes | cuffdiff |
| NCU01347 | cuffdiff | yes | cuffdiff | cuffdiff | |
| NCU01598 | yes | yes | | yes | yes |
| NCU03761 | cuffdiff | yes | cuffdiff | cuffdiff | cuffdiff |
| NCU04635 | cuffdiff | yes | cuffdiff | yes | cuffdiff |
| NCU04667 | cuffdiff | yes | cuffdiff | yes | yes |
| NCU05058 | yes | yes | yes | | cuffdiff |
| NCU05128 | cuffdiff | yes | yes | yes | yes |
| NCU06265 | yes | cuffdiff | cuffdiff | yes | yes |
| NCU06615 | yes | yes | cuffdiff | yes | yes |
| NCU06895 | cuffdiff | yes | yes | yes | yes |
| NCU07233 | cuffdiff | yes | cuffdiff | cuffdiff | cuffdiff |
| NCU07423 | cuffdiff | yes | cuffdiff | cuffdiff | cuffdiff |
| NCU07424 | yes | cuffdiff | cuffdiff | yes | yes |
| NCU07895 | cuffdiff | yes | cuffdiff | yes | cuffdiff |
| NCU08418 | cuffdiff | yes | cuffdiff | cuffdiff | cuffdiff |
| NCU08557 | yes | | | yes | cuffdiff |
| NCU08712 | cuffdiff | yes | cuffdiff | cuffdiff | cuffdiff |
| NCU09060 | yes | yes | | yes | |
| NCU09231 | cuffdiff | yes | yes | yes | yes |
| NCU09685 | cuffdiff | yes | | yes | yes |
| NCU09958 | cuffdiff | yes | cuffdiff | yes | cuffdiff |
| NCU10276 | cuffdiff | yes | yes | cuffdiff | cuffdiff |
| NCU11697 | cuffdiff | yes | cuffdiff | yes | cuffdiff |
| NCU11944 | yes | cuffdiff | yes | yes | yes |
| NCU12051 | yes | cuffdiff | cuffdiff | yes | yes |
| NCU12128 | yes | cuffdiff | cuffdiff | yes | yes |
| NCU12145 | yes | yes | yes | yes | yes |
| NCU00289 | yes | cuffdiff | cuffdiff | cuffdiff | cuffdiff |
| NCU00496 | yes | | | | yes |
| NCU00763 | yes | yes | yes | cuffdiff | yes |
| NCU01386 | yes | cuffdiff | cuffdiff | cuffdiff | cuffdiff |
| NCU02485 | yes | cuffdiff | cuffdiff | | yes |
| NCU02882 | yes | yes | cuffdiff | yes | yes |
| NCU04618 | yes | cuffdiff | cuffdiff | | yes |
| NCU04871 | yes | yes | yes | | yes |
| NCU04904 | yes | cuffdiff | cuffdiff | cuffdiff | yes |
| NCU05351 | yes | | cuffdiff | | cuffdiff |
| NCU05501 | yes | yes | yes | yes | yes |
| NCU05906 | yes | cuffdiff | cuffdiff | yes | yes |
| NCU06373 | yes | yes | yes | yes | yes |
| NCU07270 | yes | cuffdiff | cuffdiff | | yes |
| NCU08116 | yes | | | | yes |
| NCU08397 | yes | cuffdiff | cuffdiff | cuffdiff | yes |
| NCU08748 | yes | cuffdiff | cuffdiff | | cuffdiff |
| NCU08867 | yes | yes | yes | yes | cuffdiff |
| NCU09176 | yes | cuffdiff | cuffdiff | yes | yes |
| NCU11769 | yes | | | | yes |
| NCU11828 | yes | yes | yes | yes | |
| NCU11905 | yes | | cuffdiff | | yes |
| NCU00011 | yes | | | yes | cuffdiff |
| NCU00397 | yes | cuffdiff | cuffdiff | yes | cuffdiff |
| NCU00510 | yes | | | yes | cuffdiff |
| NCU00935 | yes | cuffdiff | cuffdiff | | yes |
| NCU01880 | yes | | | yes | yes |
| NCU02080 | yes | cuffdiff | cuffdiff | cuffdiff | cuffdiff |
| NCU02130 | yes | cuffdiff | cuffdiff | yes | yes |
| NCU02163 | yes | cuffdiff | cuffdiff | yes | cuffdiff |
| NCU02365 | yes | | | yes | cuffdiff |
| NCU03157 | yes | | | yes | cuffdiff |
| NCU03352 | yes | cuffdiff | cuffdiff | | cuffdiff |
| NCU03398 | yes | cuffdiff | cuffdiff | yes | yes |
| NCU03570 | yes | | | yes | |
| NCU04282 | yes | cuffdiff | cuffdiff | yes | yes |
| NCU04342 | yes | cuffdiff | cuffdiff | cuffdiff | |
| NCU04360 | yes | cuffdiff | cuffdiff | cuffdiff | cuffdiff |
| NCU04525 | yes | cuffdiff | cuffdiff | cuffdiff | cuffdiff |
| NCU04866 | yes | yes | cuffdiff | yes | |
| NCU05784 | yes | cuffdiff | cuffdiff | yes | yes |
| NCU05951 | yes | | | yes | yes |
| NCU05976 | yes | | | yes | |
| NCU06156 | yes | cuffdiff | cuffdiff | yes | yes |
| NCU06986 | yes | cuffdiff | cuffdiff | yes | cuffdiff |
| NCU07126 | yes | cuffdiff | | cuffdiff | cuffdiff |
| NCU07593 | yes | | | yes | cuffdiff |
| NCU07718 | yes | yes | yes | yes | yes |
| NCU08224 | yes | cuffdiff | cuffdiff | yes | |
| NCU08469 | yes | yes | yes | yes | yes |
| NCU08726 | yes | cuffdiff | cuffdiff | yes | cuffdiff |
| NCU09049 | yes | | | yes | yes |
| NCU09115 | yes | cuffdiff | cuffdiff | yes | yes |
| NCU09883 | yes | cuffdiff | cuffdiff | yes | cuffdiff |
| NCU10658 | yes | cuffdiff | cuffdiff | yes | |
| NCU10770 | yes | | | cuffdiff | |
| NCU11294 | yes | cuffdiff | | cuffdiff | |
| NCU00304 | yes | cuffdiff | | cuffdiff | cuffdiff |
| NCU00798 | yes | | | yes | cuffdiff |
| NCU01136 | yes | | | yes | |
| NCU01430 | yes | cuffdiff | cuffdiff | yes | yes |
| NCU03791 | yes | | | yes | yes |
| NCU04167 | yes | yes | cuffdiff | yes | yes |
| NCU04400 | yes | cuffdiff | cuffdiff | yes | yes |
| NCU04557 | yes | | | | yes |
| NCU04879 | cuffdiff | yes | | cuffdiff | |
| NCU04910 | yes | | cuffdiff | cuffdiff | yes |
| NCU04928 | yes | | | yes | |
| NCU05068 | yes | cuffdiff | cuffdiff | | yes |
| NCU05755 | yes | cuffdiff | cuffdiff | yes | yes |
| NCU05826 | yes | | | yes | yes |
| NCU05832 | yes | cuffdiff | cuffdiff | cuffdiff | cuffdiff |
| NCU05875 | yes | | | yes | yes |
| NCU05909 | yes | | cuffdiff | | yes |
| NCU06181 | yes | | | yes | |
| NCU06235 | yes | | | yes | yes |
| NCU06387 | yes | cuffdiff | cuffdiff | cuffdiff | yes |
| NCU07235 | cuffdiff | yes | yes | cuffdiff | |
| NCU07510 | yes | | cuffdiff | | yes |
| NCU07572 | cuffdiff | yes | cuffdiff | | cuffdiff |
| NCU07997 | yes | cuffdiff | | cuffdiff | yes |
| NCU08383 | yes | | | cuffdiff | yes |
| NCU08491 | cuffdiff | yes | cuffdiff | yes | yes |
| NCU08634 | yes | | | yes | yes |
| NCU09075 | cuffdiff | yes | | cuffdiff | |
| NCU09415 | yes | cuffdiff | cuffdiff | yes | cuffdiff |
| NCU09856 | yes | | | yes | yes |
| NCU09874 | cuffdiff | yes | cuffdiff | cuffdiff | cuffdiff |
| NCU09906 | yes | cuffdiff | cuffdiff | | cuffdiff |
| NCU10284 | yes | | cuffdiff | yes | cuffdiff |
| NCU10697 | yes | cuffdiff | | | yes |
| NCU11095 | yes | | | | yes |
| NCU11291 | yes | cuffdiff | cuffdiff | | cuffdiff |
| NCU11689 | cuffdiff | yes | yes | | cuffdiff |
| NCU11801 | yes | | | | cuffdiff |
| NCU11932 | yes | cuffdiff | | yes | yes |
| NCU00365 | yes | | | cuffdiff | cuffdiff |
| NCU00375 | yes | | | yes | yes |
| NCU00755 | yes | | | yes | yes |
| NCU01109 | yes | | | yes | yes |
| NCU01292 | yes | | | yes | |
| NCU01551 | yes | | | yes | cuffdiff |
| NCU01649 | yes | cuffdiff | cuffdiff | cuffdiff | cuffdiff |
| NCU03011 | yes | | | yes | |
| NCU03417 | yes | cuffdiff | | yes | |
| NCU04285 | yes | | | yes | |
| NCU04843 | yes | cuffdiff | cuffdiff | yes | cuffdiff |
| NCU04851 | yes | | | yes | |
| NCU04861 | yes | | | yes | yes |
| NCU04862 | yes | cuffdiff | cuffdiff | yes | cuffdiff |
| NCU05006 | yes | | | yes | cuffdiff |
| NCU05189 | yes | | | yes | |
| NCU05197 | yes | cuffdiff | cuffdiff | cuffdiff | cuffdiff |
| NCU05477 | yes | | | yes | |
| NCU05762 | yes | | | yes | |
| NCU05764 | yes | | | yes | |
| NCU05766 | yes | | | yes | yes |
| NCU05859 | yes | | | yes | |
| NCU05933 | yes | | | yes | yes |
| NCU06334 | yes | | | yes | yes |
| NCU07180 | yes | | | yes | yes |
| NCU07363 | yes | cuffdiff | cuffdiff | yes | cuffdiff |
| NCU08037 | yes | | cuffdiff | yes | yes |
| NCU08155 | yes | cuffdiff | | yes | cuffdiff |
| NCU08156 | yes | | | yes | yes |
| NCU08170 | yes | | | yes | |
| NCU08455 | yes | cuffdiff | cuffdiff | yes | yes |
| NCU08554 | yes | cuffdiff | cuffdiff | yes | cuffdiff |
| NCU08622 | yes | | | yes | yes |
| NCU08700 | yes | | | yes | cuffdiff |
| NCU08775 | yes | | | yes | yes |
| NCU09272 | yes | | | yes | yes |
| NCU09273 | yes | | | yes | cuffdiff |
| NCU09274 | yes | | | yes | cuffdiff |
| NCU09335 | yes | | cuffdiff | yes | yes |
| NCU09342 | yes | | | yes | |
| NCU09714 | yes | cuffdiff | | yes | yes |
| NCU09782 | yes | | cuffdiff | yes | cuffdiff |
| NCU10062 | yes | | | cuffdiff | cuffdiff |
| NCU10301 | yes | | | yes | yes |
| NCU11565 | yes | | | yes | cuffdiff |
| NCU11774 | yes | cuffdiff | cuffdiff | yes | yes |
| NCU11881 | yes | cuffdiff | cuffdiff | yes | cuffdiff |
| NCU11974 | yes | cuffdiff | cuffdiff | yes | cuffdiff |
| NCU11989 | yes | cuffdiff | cuffdiff | yes | yes |
| NCU12012 | yes | | | yes | |
| NCU12014 | yes | | | yes | |
| NCU12015 | yes | | | yes | |

TABLE 1E
Differential expression (DE) between
various conditions, continued*

| | Sucrose V Both | No Carbon v Both | Δclr-1 v |
|---|---|---|---|
| Gene | Mutants DE | Mutants DE | Δclr-2 DE |
| NCU00554 | cuffdiff | | |
| NCU00944 | | | |
| NCU01195 | cuffdiff | cuffdiff | |
| NCU02785 | cuffdiff | | |
| NCU02954 | cuffdiff | | |
| NCU03131 | cuffdiff | | |
| NCU04216 | cuffdiff | | |
| NCU04298 | | | |
| NCU04837 | cuffdiff | | |
| NCU05548 | cuffdiff | cuffdiff | |
| NCU07413 | cuffdiff | cuffdiff | |
| NCU10283 | | | |
| NCU00461 | cuffdiff | cuffdiff | yes |
| NCU00591 | | cuffdiff | cuffdiff |
| NCU00680 | cuffdiff | | cuffdiff |
| NCU01402 | | yes | |
| NCU02127 | cuffdiff | cuffdiff | cuffdiff |
| NCU02704 | | cuffdiff | yes |
| NCU02727 | cuffdiff | cuffdiff | yes |
| NCU02936 | | cuffdiff | yes |
| NCU03076 | cuffdiff | cuffdiff | cuffdiff |
| NCU03415 | | cuffdiff | cuffdiff |
| NCU03648 | | cuffdiff | cuffdiff |
| NCU03913 | | cuffdiff | yes |
| NCU05499 | | cuffdiff | cuffdiff |
| NCU05537 | cuffdiff | cuffdiff | cuffdiff |
| NCU05977 | | cuffdiff | cuffdiff |
| NCU06448 | cuffdiff | cuffdiff | cuffdiff |
| NCU06543 | | cuffdiff | cuffdiff |
| NCU07153 | cuffdiff | cuffdiff | cuffdiff |
| NCU08216 | cuffdiff | cuffdiff | cuffdiff |
| NCU09116 | | cuffdiff | cuffdiff |
| NCU09266 | cuffdiff | cuffdiff | cuffdiff |
| NCU09864 | cuffdiff | cuffdiff | cuffdiff |
| NCU11195 | cuffdiff | cuffdiff | cuffdiff |
| NCU01830 | | yes | cuffdiff |
| NCU02126 | | cuffdiff | cuffdiff |
| NCU01744 | cuffdiff | cuffdiff | cuffdiff |
| NCU03748 | cuffdiff | cuffdiff | |
| NCU06625 | cuffdiff | yes | |
| NCU04130 | cuffdiff | cuffdiff | yes |
| NCU10110 | | yes | cuffdiff |
| NCU03861 | | yes | |
| NCU07623 | | yes | |
| NCU01427 | cuffdiff | yes | |
| NCU03651 | cuffdiff | cuffdiff | yes |
| NCU02579 | cuffdiff | cuffdiff | |
| NCU07307 | | yes | |
| NCU07308 | cuffdiff | yes | |
| NCU05858 | | yes | |
| NCU01013 | | | |
| NCU06189 | cuffdiff | | |
| NCU05165 | cuffdiff | cuffdiff | yes |
| NCU04865 | cuffdiff | yes | |
| NCU05011 | | yes | |
| NCU00762 | cuffdiff | | |
| NCU00836 | | | |
| NCU01050 | cuffdiff | cuffdiff | cuffdiff |
| NCU02240 | | | |
| NCU02344 | | | |
| NCU02916 | | | |
| NCU03328 | | | |
| NCU04854 | | | |
| NCU05057 | | | |
| NCU05121 | | | |
| NCU07190 | | cuffdiff | yes |
| NCU07340 | cuffdiff | | |
| NCU07760 | yes | | |
| NCU07898 | cuffdiff | | |
| NCU08760 | | | |
| NCU09680 | | | |
| NCU03322 | | yes | cuffdiff |
| NCU07362 | cuffdiff | cuffdiff | |
| NCU03813 | | cuffdiff | cuffdiff |
| NCU04539 | | cuffdiff | |
| NCU08687 | cuffdiff | cuffdiff | |
| NCU05133 | cuffdiff | yes | cuffdiff |
| NCU09705 | | yes | cuffdiff |
| NCU07277 | cuffdiff | yes | |
| NCU04797 | cuffdiff | cuffdiff | yes |
| NCU00575 | cuffdiff | cuffdiff | |
| NCU04401 | | yes | cuffdiff |
| NCU02855 | | yes | |
| NCU05924 | cuffdiff | | |
| NCU05955 | | | |
| NCU07326 | | | |
| NCU09775 | | | |
| NCU04997 | | | |
| NCU01900 | | yes | cuffdiff |
| NCU02343 | | yes | cuffdiff |
| NCU07225 | cuffdiff | yes | cuffdiff |
| NCU08087 | yes | yes | |
| NCU08189 | cuffdiff | yes | cuffdiff |
| NCU09652 | | yes | cuffdiff |
| NCU06881 | | cuffdiff | cuffdiff |
| NCU01853 | | | |
| NCU02287 | | cuffdiff | cuffdiff |
| NCU02894 | | cuffdiff | |
| NCU07263 | cuffdiff | | yes |
| NCU08924 | cuffdiff | cuffdiff | cuffdiff |
| NCU09692 | yes | cuffdiff | |
| NCU04796 | | cuffdiff | |
| NCU09732 | cuffdiff | cuffdiff | yes |
| NCU07719 | | cuffdiff | |
| NCU12093 | | cuffdiff | |
| NCU05818 | | yes | |
| NCU04078 | | cuffdiff | yes |
| NCU07617 | | yes | |
| NCU08398 | cuffdiff | | yes |
| NCU10683 | | | |
| NCU10063 | | yes | |
| NCU04933 | cuffdiff | yes | |
| NCU00890 | | cuffdiff | yes |
| NCU04623 | | | cuffdiff |
| NCU04952 | | cuffdiff | |
| NCU05956 | | | |
| NCU07487 | | | |
| NCU08755 | | cuffdiff | yes |
| NCU00130 | | yes | yes |
| NCU00709 | | yes | |
| NCU04168 | | yes | cuffdiff |
| NCU09904 | yes | yes | |
| NCU09923 | | yes | |
| NCU03098 | | yes | |
| NCU09028 | | yes | |
| NCU09281 | | yes | |
| NCU10107 | | yes | cuffdiff |
| NCU00206 | | | |
| NCU00710 | | yes | |
| NCU01059 | | | yes |
| NCU03181 | | | |
| NCU04494 | | | |
| NCU05598 | cuffdiff | | |
| NCU05751 | | | |
| NCU08176 | | | |
| NCU08746 | | | yes |
| NCU08785 | cuffdiff | yes | |
| NCU09445 | | cuffdiff | cuffdiff |
| NCU09491 | | | |
| NCU09582 | | yes | |
| NCU09764 | | | |
| NCU09774 | | | |
| NCU09976 | | | |
| NCU10045 | | yes | |
| NCU11068 | | cuffdiff | yes |
| NCU11198 | | | |
| NCU02904 | cuffdiff | | |
| NCU04870 | cuffdiff | yes | |
| NCU05159 | | yes | cuffdiff |
| NCU09518 | | | |
| NCU09664 | | cuffdiff | |
| NCU09924 | | yes | |
| NCU03158 | | cuffdiff | |
| NCU07067 | | yes | |
| NCU01353 | cuffdiff | yes | |
| NCU07269 | | yes | |
| NCU06023 | | cuffdiff | |
| NCU06025 | | yes | |
| NCU00761 | | | |
| NCU06650 | yes | yes | cuffdiff |
| NCU09416 | cuffdiff | cuffdiff | |
| NCU00292 | | yes | cuffdiff |
| NCU03903 | | yes | |
| NCU04475 | | yes | cuffdiff |
| NCU06364 | | yes | cuffdiff |
| NCU09575 | | yes | |
| NCU04230 | cuffdiff | cuffdiff | yes |
| NCU02366 | cuffdiff | yes | |
| NCU04280 | cuffdiff | yes | |
| NCU04385 | cuffdiff | yes | |
| NCU02969 | | yes | |
| NCU08164 | cuffdiff | cuffdiff | |
| NCU00891 | cuffdiff | yes | cuffdiff |
| NCU08384 | | yes | cuffdiff |
| NCU08272 | | | cuffdiff |
| NCU07619 | | | |
| NCU05304 | cuffdiff | | |
| NCU01510 | yes | cuffdiff | |
| NCU05768 | | yes | cuffdiff |
| NCU07154 | | cuffdiff | cuffdiff |
| NCU01998 | cuffdiff | cuffdiff | |
| NCU08457 | yes | yes | cuffdiff |
| NCU06386 | | | |
| NCU09425 | | cuffdiff | cuffdiff |
| NCU02478 | cuffdiff | cuffdiff | |
| NCU09175 | cuffdiff | cuffdiff | cuffdiff |
| NCU01689 | | cuffdiff | cuffdiff |
| NCU11721 | cuffdiff | | |
| NCU02396 | cuffdiff | | cuffdiff |
| NCU07481 | | | |
| NCU03137 | | | |
| NCU02500 | yes | yes | |
| NCU00565 | cuffdiff | cuffdiff | cuffdiff |
| NCU02705 | cuffdiff | cuffdiff | cuffdiff |
| NCU05225 | cuffdiff | cuffdiff | |
| NCU08326 | | | yes |
| NCU00326 | cuffdiff | | yes |
| NCU08691 | | yes | |
| NCU09043 | yes | cuffdiff | |
| NCU07432 | cuffdiff | cuffdiff | |
| NCU05841 | | yes | |
| NCU02361 | cuffdiff | cuffdiff | cuffdiff |
| NCU10051 | cuffdiff | yes | yes |
| NCU04720 | cuffdiff | yes | cuffdiff |
| NCU04698 | cuffdiff | cuffdiff | cuffdiff |
| NCU00177 | cuffdiff | | |
| NCU01786 | cuffdiff | | |
| NCU03117 | cuffdiff | cuffdiff | |
| NCU05254 | cuffdiff | | |
| NCU03963 | cuffdiff | | yes |
| NCU09659 | cuffdiff | cuffdiff | yes |
| NCU03488 | cuffdiff | yes | |
| NCU02657 | cuffdiff | | |
| NCU05855 | cuffdiff | yes | |
| NCU08044 | cuffdiff | cuffdiff | cuffdiff |
| NCU09283 | cuffdiff | cuffdiff | cuffdiff |
| NCU11243 | | cuffdiff | |
| NCU01378 | cuffdiff | cuffdiff | |
| NCU01861 | cuffdiff | cuffdiff | cuffdiff |
| NCU04583 | cuffdiff | yes | |
| NCU06616 | cuffdiff | cuffdiff | yes |
| NCU07325 | | cuffdiff | |
| NCU08771 | | cuffdiff | cuffdiff |
| NCU09553 | | cuffdiff | cuffdiff |
| NCU10055 | | | |
| NCU11289 | | | |
| NCU08750 | cuffdiff | yes | cuffdiff |
| NCU08752 | | yes | yes |
| NCU03049 | | cuffdiff | |
| NCU05653 | | cuffdiff | |
| NCU07133 | | cuffdiff | cuffdiff |
| NCU08925 | | cuffdiff | |
| NCU09865 | | | |
| NCU11365 | cuffdiff | cuffdiff | |
| NCU07055 | cuffdiff | yes | |
| NCU07224 | | yes | |
| NCU01061 | cuffdiff | yes | |
| NCU03566 | | cuffdiff | |
| NCU04260 | | yes | |
| NCU05094 | | yes | |
| NCU05986 | | cuffdiff | |
| NCU06153 | | yes | |
| NCU09674 | cuffdiff | yes | |
| NCU11241 | cuffdiff | yes | |
| NCU03013 | cuffdiff | yes | cuffdiff |
| NCU05319 | cuffdiff | | |
| NCU04430 | | yes | yes |
| NCU02059 | yes | cuffdiff | |
| NCU00831 | cuffdiff | cuffdiff | cuffdiff |
| NCU06055 | | cuffdiff | |
| NCU00263 | cuffdiff | yes | yes |
| NCU07200 | cuffdiff | yes | yes |
| NCU09992 | | yes | yes |
| NCU09265 | cuffdiff | cuffdiff | cuffdiff |
| NCU00813 | cuffdiff | | |
| NCU02455 | cuffdiff | cuffdiff | cuffdiff |
| NCU09223 | cuffdiff | cuffdiff | |
| NCU09485 | | cuffdiff | |
| NCU01648 | cuffdiff | cuffdiff | |
| NCU10497 | | | cuffdiff |
| NCU00669 | | | |
| NCU02118 | | | |
| NCU10762 | | | |
| NCU00244 | cuffdiff | cuffdiff | |
| NCU01068 | cuffdiff | cuffdiff | |
| NCU03319 | cuffdiff | cuffdiff | |
| NCU08761 | | | |
| NCU01279 | cuffdiff | cuffdiff | |
| NCU03819 | | cuffdiff | |
| NCU08607 | cuffdiff | cuffdiff | |
| NCU09195 | | cuffdiff | |
| NCU07736 | cuffdiff | yes | cuffdiff |
| NCU01290 | cuffdiff | | |
| NCU03396 | cuffdiff | | |
| NCU09521 | cuffdiff | | |
| NCU03897 | | | |
| NCU07746 | cuffdiff | | |
| NCU08897 | | cuffdiff | |
| NCU00169 | | cuffdiff | |
| NCU02681 | cuffdiff | | |
| NCU06333 | | | |
| NCU01146 | | cuffdiff | |
| NCU00931 | cuffdiff | | |
| NCU07008 | | yes | |
| NCU03295 | | cuffdiff | cuffdiff |
| NCU07737 | cuffdiff | yes | cuffdiff |
| NCU08038 | | cuffdiff | |
| NCU02729 | cuffdiff | | |
| NCU03364 | | cuffdiff | |
| NCU03817 | | yes | |
| NCU06111 | cuffdiff | yes | |
| NCU08115 | | yes | cuffdiff |
| NCU06931 | | | |
| NCU04077 | cuffdiff | cuffdiff | |
| NCU01862 | | cuffdiff | |
| NCU02795 | | cuffdiff | |
| NCU00812 | cuffdiff | | cuffdiff |
| NCU01856 | cuffdiff | cuffdiff | |
| NCU03725 | cuffdiff | cuffdiff | |
| NCU06971 | | | cuffdiff |
| NCU07705 | | cuffdiff | yes |
| NCU08042 | | | yes |
| NCU03643 | | | cuffdiff |
| NCU03043 | cuffdiff | cuffdiff | cuffdiff |
| NCU05767 | | yes | |
| NCU00316 | | | cuffdiff |
| NCU00721 | cuffdiff | yes | |
| NCU07578 | cuffdiff | cuffdiff | |
| NCU04435 | | | |
| NCU05198 | | cuffdiff | |
| NCU10721 | | | |
| NCU11342 | | | |
| NCU00821 | | cuffdiff | cuffdiff |
| NCU08561 | | cuffdiff | yes |
| NCU09287 | | cuffdiff | cuffdiff |
| NCU00801 | | yes | cuffdiff |
| NCU00809 | | cuffdiff | |
| NCU07668 | | yes | |
| NCU05089 | | yes | |
| NCU08152 | | yes | |
| NCU01633 | cuffdiff | yes | cuffdiff |
| NCU04537 | | yes | |
| NCU05853 | | yes | yes |
| NCU08114 | cuffdiff | yes | yes |
| NCU00023 | | cuffdiff | |
| NCU02009 | yes | cuffdiff | |
| NCU07068 | | cuffdiff | |
| NCU03305 | | cuffdiff | |
| NCU08225 | cuffdiff | cuffdiff | |
| NCU08147 | yes | cuffdiff | |
| NCU06366 | cuffdiff | cuffdiff | |
| NCU05585 | | cuffdiff | cuffdiff |
| NCU06138 | | yes | cuffdiff |
| NCU05591 | | yes | cuffdiff |
| NCU06032 | | | |
| NCU09098 | cuffdiff | | |
| NCU10009 | | | |
| NCU00290 | | cuffdiff | cuffdiff |
| NCU09580 | | | |
| NCU00803 | | yes | |
| NCU04374 | | yes | |
| NCU08425 | | yes | |
| NCU04097 | cuffdiff | | cuffdiff |
| NCU05079 | cuffdiff | yes | cuffdiff |
| NCU07546 | | yes | |
| NCU08148 | cuffdiff | yes | yes |
| NCU03107 | | yes | |
| NCU00586 | cuffdiff | cuffdiff | |
| NCU00716 | cuffdiff | | yes |
| NCU00025 | cuffdiff | cuffdiff | |
| NCU00848 | cuffdiff | yes | |
| NCU00449 | cuffdiff | cuffdiff | cuffdiff |
| NCU00849 | | yes | yes |
| NCU01058 | | | |
| NCU01076 | | | |
| NCU01196 | | | |
| NCU01978 | | | |
| NCU02138 | cuffdiff | yes | |
| NCU03083 | | cuffdiff | |
| NCU03982 | cuffdiff | cuffdiff | |
| NCU04948 | cuffdiff | | |
| NCU05230 | | | |
| NCU05863 | | cuffdiff | yes |
| NCU05864 | | cuffdiff | cuffdiff |
| NCU06152 | | | |
| NCU06607 | | | |
| NCU08756 | | cuffdiff | yes |
| NCU08790 | cuffdiff | cuffdiff | yes |
| NCU09295 | cuffdiff | cuffdiff | |
| NCU09524 | | | yes |
| NCU11268 | | | |
| NCU11542 | | | |
| NCU11753 | yes | | |
| NCU00175 | | cuffdiff | cuffdiff |
| NCU00250 | yes | cuffdiff | |
| NCU00322 | cuffdiff | cuffdiff | cuffdiff |
| NCU00695 | cuffdiff | cuffdiff | cuffdiff |
| NCU07311 | cuffdiff | cuffdiff | |
| NCU08171 | yes | cuffdiff | cuffdiff |
| NCU08521 | | | |
| NCU10507 | | cuffdiff | |
| NCU07143 | | yes | cuffdiff |
| NCU07222 | cuffdiff | yes | |
| NCU08371 | | cuffdiff | |
| NCU09506 | | | |
| NCU04106 | cuffdiff | yes | |
| NCU06526 | | yes | cuffdiff |
| NCU09196 | | cuffdiff | |
| NCU11466 | | cuffdiff | |
| NCU11957 | | | |
| NCU00995 | cuffdiff | yes | yes |
| NCU01720 | cuffdiff | yes | |
| NCU03293 | cuffdiff | yes | cuffdiff |
| NCU04169 | | yes | |
| NCU04170 | | yes | |
| NCU04467 | cuffdiff | yes | cuffdiff |
| NCU04932 | cuffdiff | yes | |
| NCU04998 | | yes | |
| NCU05134 | yes | yes | yes |
| NCU05350 | | yes | cuffdiff |
| NCU05829 | cuffdiff | yes | |
| NCU05852 | | yes | cuffdiff |
| NCU05908 | | cuffdiff | yes |
| NCU06143 | | yes | cuffdiff |
| NCU06983 | | yes | |
| NCU06991 | | yes | |
| NCU08635 | yes | yes | |
| NCU09046 | | yes | |
| NCU09172 | | cuffdiff | |
| NCU09424 | | yes | |
| NCU09498 | cuffdiff | yes | |
| NCU09823 | cuffdiff | yes | cuffdiff |
| NCU09848 | cuffdiff | yes | |
| NCU10014 | cuffdiff | yes | cuffdiff |
| NCU10039 | | yes | |
| NCU10687 | cuffdiff | yes | |
| NCU00561 | | yes | |
| NCU00859 | cuffdiff | yes | cuffdiff |
| NCU02042 | cuffdiff | yes | |
| NCU02164 | cuffdiff | yes | |
| NCU04482 | | yes | |
| NCU04486 | | yes | |
| NCU05236 | | yes | |
| NCU05761 | | yes | |
| NCU05763 | | yes | |
| NCU06328 | cuffdiff | yes | |
| NCU07948 | | yes | |
| NCU08140 | | | |
| NCU08447 | | yes | |
| NCU09734 | | yes | |
| NCU12011 | | yes | |
| NCU00408 | cuffdiff | | |
| NCU00633 | cuffdiff | | cuffdiff |
| NCU00870 | | yes | cuffdiff |
| NCU00871 | | | |
| NCU00965 | | | |
| NCU01003 | | | |
| NCU01049 | | | |
| NCU01077 | | | |
| NCU01148 | | | |
| NCU01944 | | yes | |
| NCU01970 | cuffdiff | cuffdiff | |
| NCU01983 | cuffdiff | | |
| NCU02008 | yes | cuffdiff | |
| NCU02061 | yes | yes | cuffdiff |
| NCU02600 | | | |
| NCU02625 | | | |
| NCU02720 | cuffdiff | | |
| NCU02915 | | cuffdiff | |
| NCU03152 | cuffdiff | | |
| NCU03329 | cuffdiff | cuffdiff | |
| NCU03433 | | | |
| NCU04127 | cuffdiff | | |
| NCU04522 | | cuffdiff | yes |
| NCU04830 | cuffdiff | | |
| NCU04905 | | cuffdiff | |
| NCU05056 | | | |
| NCU05170 | cuffdiff | cuffdiff | cuffdiff |
| NCU05569 | cuffdiff | cuffdiff | |
| NCU05574 | | cuffdiff | yes |
| NCU05846 | | cuffdiff | yes |
| NCU05848 | cuffdiff | cuffdiff | cuffdiff |
| NCU05854 | | | |
| NCU06214 | cuffdiff | cuffdiff | |
| NCU06312 | | | |
| NCU06704 | cuffdiff | cuffdiff | cuffdiff |
| NCU07207 | | | |
| NCU07336 | | | |
| NCU07339 | | | |
| NCU07453 | cuffdiff | | |
| NCU07897 | | | |
| NCU07979 | yes | | |
| NCU08043 | | | |
| NCU08113 | | cuffdiff | yes |
| NCU08117 | | | |
| NCU08379 | cuffdiff | cuffdiff | cuffdiff |
| NCU08624 | | | |
| NCU08784 | | | |
| NCU09003 | | | |
| NCU09426 | | | |
| NCU09479 | | | |
| NCU09522 | | | |
| NCU09523 | | | |
| NCU09689 | | cuffdiff | yes |
| NCU10521 | cuffdiff | | |
| NCU11118 | cuffdiff | | cuffdiff |
| NCU11278 | | | |
| NCU11327 | cuffdiff | | |
| NCU11397 | cuffdiff | | |
| NCU11690 | | | |
| NCU11722 | cuffdiff | | |
| NCU11862 | | cuffdiff | |
| NCU00247 | yes | | cuffdiff |
| NCU01347 | | | cuffdiff |
| NCU01598 | | | |
| NCU03761 | cuffdiff | | yes |
| NCU04635 | yes | cuffdiff | yes |
| NCU04667 | cuffdiff | cuffdiff | |
| NCU05058 | | | |
| NCU05128 | | yes | |
| NCU06265 | yes | cuffdiff | cuffdiff |
| NCU06615 | cuffdiff | cuffdiff | cuffdiff |
| NCU06895 | | cuffdiff | cuffdiff |
| NCU07233 | cuffdiff | cuffdiff | cuffdiff |
| NCU07423 | | | cuffdiff |
| NCU07424 | cuffdiff | cuffdiff | cuffdiff |
| NCU07895 | | cuffdiff | cuffdiff |
| NCU08418 | | cuffdiff | cuffdiff |
| NCU08557 | yes | | |
| NCU08712 | cuffdiff | cuffdiff | cuffdiff |
| NCU09060 | | | yes |
| NCU09231 | | cuffdiff | |
| NCU09685 | | | yes |
| NCU09958 | cuffdiff | cuffdiff | yes |
| NCU10276 | cuffdiff | yes | cuffdiff |
| NCU11697 | | | cuffdiff |
| NCU11944 | | | |
| NCU12051 | | cuffdiff | |
| NCU12128 | | | |
| NCU12145 | | cuffdiff | |
| NCU00289 | cuffdiff | cuffdiff | cuffdiff |
| NCU00496 | | | |
| NCU00763 | | | |
| NCU01386 | cuffdiff | cuffdiff | cuffdiff |
| NCU02485 | | yes | cuffdiff |
| NCU02882 | | yes | |
| NCU04618 | yes | cuffdiff | |
| NCU04871 | | | |
| NCU04904 | cuffdiff | cuffdiff | |
| NCU05351 | | cuffdiff | |
| NCU05501 | | yes | |
| NCU05906 | | cuffdiff | |
| NCU06373 | | cuffdiff | |
| NCU07270 | | | |
| NCU08116 | | | |
| NCU08397 | cuffdiff | yes | yes |
| NCU08748 | cuffdiff | | |
| NCU08867 | | yes | |
| NCU09176 | yes | yes | cuffdiff |
| NCU11769 | | | |
| NCU11828 | cuffdiff | yes | |
| NCU11905 | | | |
| NCU00011 | | | |
| NCU00397 | cuffdiff | cuffdiff | |
| NCU00510 | | cuffdiff | |
| NCU00935 | cuffdiff | yes | |
| NCU01880 | | cuffdiff | |
| NCU02080 | cuffdiff | cuffdiff | cuffdiff |
| NCU02130 | | cuffdiff | |
| NCU02163 | cuffdiff | yes | cuffdiff |
| NCU02365 | | yes | |
| NCU03157 | | cuffdiff | |
| NCU03352 | cuffdiff | cuffdiff | |
| NCU03398 | | cuffdiff | cuffdiff |
| NCU03570 | | yes | |
| NCU04282 | | yes | |
| NCU04342 | cuffdiff | cuffdiff | cuffdiff |
| NCU04360 | cuffdiff | cuffdiff | |
| NCU04525 | cuffdiff | yes | |
| NCU04866 | cuffdiff | yes | |
| NCU05784 | | yes | |
| NCU05951 | | yes | |
| NCU05976 | | | |
| NCU06156 | cuffdiff | cuffdiff | |
| NCU06986 | | yes | |
| NCU07126 | cuffdiff | cuffdiff | |
| NCU07593 | | | |
| NCU07718 | cuffdiff | yes | |
| NCU08224 | | yes | |
| NCU08469 | | cuffdiff | |
| NCU08726 | | cuffdiff | |
| NCU09049 | | yes | |
| NCU09115 | cuffdiff | cuffdiff | cuffdiff |
| NCU09883 | | cuffdiff | |
| NCU10658 | | cuffdiff | |
| NCU10770 | | | |
| NCU11294 | cuffdiff | cuffdiff | cuffdiff |
| NCU00304 | cuffdiff | yes | cuffdiff |
| NCU00798 | cuffdiff | yes | |
| NCU01136 | cuffdiff | yes | |
| NCU01430 | | yes | |
| NCU03791 | cuffdiff | yes | cuffdiff |
| NCU04167 | | yes | cuffdiff |
| NCU04400 | cuffdiff | yes | cuffdiff |
| NCU04557 | | yes | |
| NCU04879 | cuffdiff | yes | yes |
| NCU04910 | cuffdiff | cuffdiff | cuffdiff |
| NCU04928 | cuffdiff | | |
| NCU05068 | | yes | cuffdiff |
| NCU05755 | | yes | |
| NCU05826 | cuffdiff | yes | |
| NCU05832 | cuffdiff | yes | cuffdiff |
| NCU05875 | | yes | |
| NCU05909 | | yes | |
| NCU06181 | | yes | |
| NCU06235 | cuffdiff | yes | |
| NCU06387 | | yes | |
| NCU07235 | | yes | |
| NCU07510 | | yes | |
| NCU07572 | | yes | cuffdiff |
| NCU07997 | cuffdiff | yes | cuffdiff |
| NCU08383 | | yes | |
| NCU08491 | | cuffdiff | cuffdiff |
| NCU08634 | | yes | |
| NCU09075 | yes | yes | |
| NCU09415 | cuffdiff | yes | |
| NCU09856 | | yes | |
| NCU09874 | cuffdiff | yes | yes |
| NCU09906 | yes | yes | |
| NCU10284 | cuffdiff | yes | cuffdiff |
| NCU10697 | | yes | |
| NCU11095 | | yes | |
| NCU11291 | cuffdiff | yes | |
| NCU11689 | | yes | |
| NCU11801 | | yes | |
| NCU11932 | | yes | cuffdiff |
| NCU00365 | cuffdiff | yes | |
| NCU00375 | | yes | |
| NCU00755 | | yes | |
| NCU01109 | | yes | |
| NCU01292 | cuffdiff | | |
| NCU01551 | | yes | |
| NCU01649 | cuffdiff | cuffdiff | |
| NCU03011 | | yes | |
| NCU03417 | | yes | |
| NCU04285 | | yes | |
| NCU04843 | cuffdiff | cuffdiff | cuffdiff |
| NCU04851 | | cuffdiff | |
| NCU04861 | | yes | |
| NCU04862 | yes | yes | |
| NCU05006 | cuffdiff | yes | |
| NCU05189 | | yes | |
| NCU05197 | cuffdiff | cuffdiff | |
| NCU05477 | | yes | |
| NCU05762 | | yes | |
| NCU05764 | | yes | |
| NCU05766 | cuffdiff | yes | |
| NCU05859 | cuffdiff | yes | |
| NCU05933 | | cuffdiff | |
| NCU06334 | | yes | |
| NCU07180 | | yes | |
| NCU07363 | cuffdiff | yes | |
| NCU08037 | cuffdiff | yes | cuffdiff |
| NCU08155 | cuffdiff | yes | cuffdiff |
| NCU08156 | | yes | |
| NCU08170 | | yes | |
| NCU08455 | | yes | |
| NCU08554 | | cuffdiff | cuffdiff |
| NCU08622 | cuffdiff | yes | |
| NCU08700 | | yes | |
| NCU08775 | | yes | |
| NCU09272 | | yes | |
| NCU09273 | yes | yes | |
| NCU09274 | yes | yes | |
| NCU09335 | | yes | cuffdiff |
| NCU09342 | | yes | |
| NCU09714 | yes | cuffdiff | |
| NCU09782 | cuffdiff | cuffdiff | cuffdiff |
| NCU10062 | cuffdiff | cuffdiff | |
| NCU10301 | | cuffdiff | |
| NCU11565 | | cuffdiff | |
| NCU11774 | cuffdiff | cuffdiff | |
| NCU11881 | cuffdiff | yes | |
| NCU11974 | | yes | cuffdiff |
| NCU11989 | | yes | |
| NCU12012 | | yes | |
| NCU12014 | | yes | |
| NCU12015 | | yes | |

*Yes: Passed cuffdiff statistical test and was consistently different by a factor of 2 between all replicates of each condition. Cuffdiff: Passed cuffdiff statistical test but was not consistently different by a factor of 2 between all replicates tested.

1. A method of degrading cellulose-containing material, the method comprising:
a) contacting cellulose-containing material with a fungal host cell comprising at least one recombinant nucleic acid encoding a transcription factor protein, wherein said transcription factor protein comprises a zinc(2)-cysteine(6) binuclear cluster domain, a PFAM04082 transcription factor domain, and at least one polypeptide sequence selected from the group consisting of SEQ ID NOs: 184, 185, 186, and 187; and
b) incubating said fungal host cell and cellulose-containing material under conditions sufficient for the fungal host cell to degrade said cellulose-containing material.

2. The method of claim 1, wherein said transcription factor protein comprises at least one additional polypeptide sequence selected from the group consisting of SEQ ID NOs: 184, 185, 186, and 187.

3. The method of claim 1, wherein said transcription factor protein comprises at least two additional polypeptide sequences selected from the group consisting of SEQ ID NOs: 184, 185, 186, and 187.

4. The method of claim 1, wherein said transcription factor protein comprises at least three additional polypeptide sequences selected from the group consisting of SEQ ID NOs: 184, 185, 186, and 187.

5. The method of claim 1, wherein said transcription factor protein comprises SEQ ID NOs: 184, 185, 186, and 187.

6. The method of claim 1, wherein said fungal host cell is incubated under conditions sufficient for the fungal host cell to express said transcription factor protein.

7. The method of claim 1, wherein said fungal host cell produces a greater amount of one or more cellulases than a corresponding fungal host cell lacking said at least one recombinant nucleic acid.

8. The method of claim 1, wherein said cellulose-containing material comprises biomass.

9.-11. (canceled)

12. The method of claim 8, wherein said biomass is selected from the group consisting of Miscanthus, switchgrass, cord grass, rye grass, reed canary grass, elephant grass, common reed, wheat straw, barley straw, canola straw, oat straw, corn stover, soybean stover, oat hulls, sorghum, rice hulls, sugarcane bagasse, corn fiber, Distillers Dried Grains with Solubles (DDGS), Blue Stem, corncobs, pine wood, birch wood, willow wood, aspen wood, poplar wood, and energy cane.

13. The method of claim 1, wherein said fungal host cell further comprises one or more recombinant nucleic acids that encode a polypeptide involved in a biochemical pathway for the production of at least one biofuel and further comprising the step of incubating said fungal host cell with said degraded cellulose-containing material under conditions sufficient for the fungal host cell to convert the cellulose-containing material to at least one biofuel.

14. (canceled)

15. The method of claim 13, wherein said biofuel is selected from the group consisting of ethanol, n-propanol, n-butanol, iso-butanol, 3-methyl-1-butanol, 2-methyl-1-butanol, 3-methyl-1-pentanol, and octanol.

16. The method claim 1, wherein said degraded cellulose-containing material is cultured with a fermentative microorganism under conditions sufficient to produce at least one fermentation product from the degraded cellulose-containing material.

17. A method of increasing the production of one or more cellulases from a fungal cell, the method comprising:
(a) providing a fungal host cell comprising at least one recombinant nucleic acid encoding a transcription factor protein, wherein said transcription factor protein comprises a zinc(2)-cysteine(6) binuclear cluster domain, a PFAM04082 transcription factor domain, and at least one polypeptide sequence selected from the group consisting of SEQ ID NOs: 184, 185, 186, and 187; and
(b) culturing said host cell under conditions sufficient to support the expression of said at least one recombinant nucleic acid, wherein said fungal host cell produces a greater amount of said one or more cellulases than a corresponding host cell lacking said at least one recombinant nucleic acid.

18. The method of claim 17, wherein said fungal host cell is cultured in the absence of cellulose.

19. The method claim 1, wherein said at least one recombinant nucleic acid is SEQ ID NO: 5.

20. (canceled)

21. The method claim 1, wherein said fungal host cell further comprises at least one additional recombinant nucleic acid encoding an additional transcription factor protein, wherein said additional transcription factor protein comprises a zinc(2)-cysteine(6) binuclear cluster domain, a PFAM04082 transcription factor domain, and at least one polypeptide sequence selected from the group consisting of SEQ ID NOs: 188, 189, 190, 191, and 192.

22.-26. (canceled)

27. The method claim 21, wherein the at least one additional recombinant nucleic acid encoding said additional transcription factor protein is SEQ ID NO: 2.

28. (canceled)

29. The method claim 1, wherein said fungal host cell further comprises at least one recombinant nucleic acid encoding a hemicellulase.

30. The method of claim 1, wherein said fungal host cell is selected from the group consisting of Neurospora crassa, Metarhizium anisopliae, Gibberella zeae, Nectria haematococca, Magnaporthe oryzae, Neurospora tetrasperma, Sordaria macrospora, Chaetomium globosum, Podospora anserina, Verticillium albo-atrum, Glomerella graminicola, Grosmannia clavigera, Sclerotinia sclerotiorum, Botryotinia fuckeliana, Aspergillus oryzae, Aspergillus nidulans, Aspergillus niger, Aspergillus fumigatus, Penicillium chrysogenum, Leptosphaeria maculans, Phaeosphaeria nodorum, Pyrenophora tritici-repentis, Pyrenophora teres, Penicillium marneffei, Talaromyces stipitatus, Trichoderma reesei, Uncinocarpus reesii, Coccidioides immitus, Coccidioides posadasii, Saccharomyces cerevisiae, Schizosaccharomyces pombe, Sporotrichum thermophile (Myceliophthora thermophila), Thielavia terrestris-thermophilic, Acremonium cellulolyticus, Yarrowia lipolytica, Hansenula polymorpha, Kluyveromyces lactis, Pichia pastoris, Mycosphaerella graminicola, Neosartorya fischeri, Thermomyces lanuginosus (Humicola brevis, Humicola brevispora, Humicola grisea, Humicola lanuginosa, Monotospora lanuginosa, Sepedonium lanuginosum), Talaromyces thermophilus (Talaromyces dupontii, Penicillium dupontii), and Chrysosporium lucknowense.

31.-36. (canceled)

The application's sequence listing, which the Patent Office published only in electronic form, follows.

SEQUENCE LISTING (238 sequences)

SEQ ID NO: 1 - protein, 710 aa, Neurospora crassa
MSPSSNSDSPASVVGSMTMAAQAAPNVVRQYPLPNRDFTIEIPSPQVAPTTNGVNTVKSPSTLKSSRAPNFSREGILGSAQKARNLSQSSENRPDHVNVSNGFHKAPSEESTNPLKRRNTDAGVDYPRRRATIACEVCRSRKSRCDGTKPKCKLCTELGAECIYREPGIKLDAGDKLILERLNRIESLLQLNMGLTGHTHGLGLSHNSPGMSNGTGLSGDNLMMQNPDAAGFVSVIPSGGLGTWSATATNSLSTMPKVHTNAALHLLQWPMIRDLVSRPYDPQILLQLEMAREPLHSLTKTPCVDLSNTSAYIEAYFDRVNVWYACVNPYTWRSHYRIALSNGFREGPESCIVLLVLALGQASLRGSISRIVPHEDPPGLQYFTAAWALLPGMMTSNSVLAAQCHLLAAAYLFYLVRPLEAWNLLCTTSTKLQLLLMTPNRVPVDQRELSERIYWNALLFESDLLAELDLPHSGVVAFEENVGLPCGFEGDEQEAVGRDDLWYFLAEIALRRLLNRVSQLIYSKDSLASTTSLEPIVTELDFQLTQWYESLPLPLQFPFTRTMLPDPVQTVLRLRFFACRTIIYRPYILAVLDNEQAILDPSVRDACTKCLEASIRQLEHISAHHAGHMPYLWQGALSIVSQTLLIMGATMSPSLNSILVSLVSHRDVIDQIINDVVMEIERYSVLSPSLSLSAEIIKEAEVRRRTFLSG

SEQ ID NO: 2 - DNA, 2133 bp, Neurospora crassa
atgtcgccgtcttccaacagcgactctcccgcctcggtagtgggcagcatgaccatggccgcgcaggctgctcccaacgttgtaaggcaatatcctctgccgaatcgagacttcacaatcgaaattccctcgccccaagttgcacccactaccaatggggtcaacaccgtcaagtcaccctccactctcaagtcgtcccgtgctcccaacttcagccgcgaaggtattcttggatcggcccagaaagcccgaaatctctcgcagtcgtctgaaaaccggcctgaccatgtcaatgtctctaatggctttcacaaggctcctagtgaggagagcaccaatccgctgaaaagaagaaatacggatgctggcgtcgactaccctagaagaagggcaaccattgcgtgcgaggtatgccgctcgaggaagtcgcggtgtgacggcacaaaaccaaaatgcaagctgtgcacagagttgggtgccgagtgcatatatcgcgagcctggtatcaagctggatgccggcgacaagctcatcctcgaacgcctcaacaggatagaaagtctgctgcaattaaacatgggcctaaccggtcatacccatggcctaggattatcccataactccccggggatgagcaacgggacagggttgagtggtgacaacctgatgatgcaaaatcccgacgccgccggctttgtctcggtgatccccagcggaggcttgggcacatggtccgctaccgctaccaacagcttgtcaacaatgcccaaggtccacaccaatgccgcccttcatttgttgcaatggcccatgattcgggatctcgtctcacgaccttacgacccacaaattctcctccaactcgaaatggccagggagccactccactcgctcacaaagaccccttgtgtggacctctccaacacttccgcctacatcgaagcctatttcgatcgtgtcaacgtttggtacgcctgtgtcaacccttatacatggaggagccactatcgtatcgccctctcgaacggtttcagggaaggaccagaaagttgtattgtgcttctcgtcttggctctcggtcaggcaagtttacgggggagcatatccaggatcgtgccacatgaggatcccccgggcctccaatatttcacggccgcatgggccttgctaccgggcatgatgacctccaacagcgttctcgccgctcaatgccaccttttagctgccgcttacctattctacctcgtccgacccctggaagcatggaaccttctctgcacaacaagtaccaagttgcagctcctccttatgacgccgaaccgagtgcctgtcgaccaaagggaactgagtgaaaggatctactggaatgctctgctgttcgagagcgacctcctcgccgagctggaccttccgcattctggtgttgttgcatttgaagaaaatgttggtctgccatgtggcttcgagggggatgagcaagaggcagttggtcgcgatgatttgtggtatttcctcgccgaaatagcacttcggcgactactcaaccgcgtcagccagctcatttactccaaggactccttggcctctacaacgagtctcgaacccatcgtgaccgagttggatttccaactaacgcagtggtacgagagtctacctctaccgctgcaatttccgtttactcggacaatgctcccagatcctgtccagacggtgttgcggttgcgcttctttgcttgccggaccattatttaccggccatacattctcgcggtcctcgacaatgaacaggcaatactggacccctcagtgcgtgacgcgtgcacaaagtgtctggaggcttcaatcagacaattggagcatatcagtgcacatcacgccggacacatgccgtacctttggcaaggggcactctcgattgtatcgcagacacttctgattatgggtgccactatgtcaccgtcactaaacagtattctggtgagcttggtctcacaccgcgacgttatcgaccagatcatcaacgatgtcgtcatggagatcgagcgttattccgtactctcacccagtctgagcctctcggcggagattatcaaggaagcggaggttaggcgacgaacgttcctgagtggttga

SEQ ID NO: 3 - DNA, 4181 bp, Neurospora crassa
gagcgcctctatctgcattctactaaacgaatataccaactaggtattagtcacgagacggcccactaatacacgacagtcctcatttccggtaatcgaaacacacggtggatgtctgagggactctactttgacagacagtcgcgtcttaaccagtcgccaacaacataacgattcaagcgtgttctggttcatgctgaagtggtcgtgactcgggctggttgaggtgttgtgggcaaacaaagggtcgacatttcatcactgtcttctgtccatttcggtcgactaccaagcagaccctgaccacttgcatacgacatgtcgccgtcttccaacagcgactctcccgcctcggtagtgggcagcatgaccatggccgcgcaggctgctcccaacgttgtaaggcaatatcctctgccgaatcgagacttcacaatcgaaattccctcgccccaagttgcacccactaccaatggggtcaacaccgtcaagtcaccctccactctcaagtcgtcccgtgctcccaacttcagccgcgaaggtattcttggatcggcccagaaagcccgaaatctctcgcagtcgtctgaaaaccggcctgaccatgtcaatgtctctaatggctttcacaaggctcctagtgaggagagcaccaatccgctgaaaagaagaaatacggatgctggcgtcgactaccctagaagaagggcaaccattgcggtatgtttgggctctggcgcagtggaaaaatctggtgtggtgaatctacacgctgacatttcgttgaacagtgcgaggtatgccgctcgaggaagtcgcggtgtgacggcacaaaaccaaaatgcaagctgtgcacagagttgggtgccgagtgcatatatcgcgagcctggtatcaagctggatgccggcgacaagctcatcctcgaacgcctcaacaggatagaaagtctgctgcaattaaacatgggcctaaccggtcatacccatggcctaggattatcccataactccccggggatgagcaacgggacagggttgagtggtgacaacctgatgatgcaaaatcccgacgccgccggctttgtctcggtgatccccagcggaggcttgggcacatggtccgctaccgctaccaacagcttgtcaacaatgcccaaggtccacaccaatgccgcccttcatttgttgcaatggcccatgattcgggatctcgtctcacgaccttacgacccacaaattctcctccaactcgaaatggccagggagccactccactcgctcacaaagaccccttgtgtggacctctccaacacttccgcctacatcgaagcctatttcgatcgtgtcaacgtttggtacgcctgtgtcaacccttatacatggaggagccactatcgtatcgccctctcgaacggtttcagggaaggaccagaaagttgtattgtgcttctcgtcttggctctcggtcaggcaagtttacgggggagcatatccaggatcgtgccacatgaggatcccccgggcctccaatatttcacggccgcatgggccttgctaccgggcatgatgacctccaacagcgttctcgccgctcaatgccaccttttagctgccgcttacctattctacctcgtccgacccctggaagcatggaaccttctctgcacaacaagtaccaagttgcagctcctccttatgacgccgaaccgagtgcctgtcgaccaaagggaactgagtgaaaggatctactggaatgctctgctgttcgagagcgacctcctcgccgagctggaccttccgcattctggtgttgttgcatttgaagaaaatgttggtctgccatgtggcttcgagggggatgagcaagaggcagttggtcgcgatgatttgtggtatttcctcgccgaaatagcacttcggcgactactcaaccgcgtcagccagctcatttactccaaggactccttggcctctacaacgagtctcgaacccatcgtgaccgagttggatttccaactaacgcagtggtacgagagtctacctctaccgctgcaatttccgtttactcggacaatgctcccagatcctgtccagacggtgttgcggttgcgcttctttgcttgccggaccattatttaccggccatacattctcgcggtcctcgacaatgaacaggcaatactggacccctcagtgcgtgacgcgtgcacaaagtgtctggaggcttcaatcagacaattggagcatatcagtgcacagtaagtcttcgcccgttaatattcgggttttgattggctgtcttttcctttttattacgtctcaatctaacaaaaggccgcagtcacgccggacacatgccgtacctttggcaaggggcactctcgattgtatcgcagacacttctgattatgggtgccactatgtcaccgtcactaaacagtattctggtgagcttggtctcacaccgcgacgttatcgaccagatcatcaacgatgtcgtcatggagatcgagcgttattccgtactctcacccagtctgagcctctcggcggagattatcaaggaagcggaggttaggcgacgaacgttcctgagtggttgaggaatcgctttactacactcgatgtcatagacacaaaaggtcaaacggtcccatcaaactcgccacatccaaacctttcaatcacccaaaagttaaaccgccagcagttgaacctatggtgttctgtcatggcacgaagcaagctacaggtgcatctggtcctccacggatgcaacgccagtacaagatgtatttttttcaggactgaaacagtcgctgtccaagtcgttggctgcattgactatcaaatttattcctgcgacgaaaacagccattctcttgatctgtactgccagcagacgtgaaaaataatccgggctcgctcatacacaaccaagcccagtaagtgtccggactgcattcacaccatctgcccgcctccccgccttcggaagggcgctcaccgaatggtctgaagatcataccaatgttgatcgaccagccttgcctgataacctgataaaccatggccctgactatgggcacgccggtttttgtgagcatttgacctacttctatctcatacactcctgttgtagctggctacaacgtggtatcttgactggaaaccccgaccagcgaccgacagacaatcccattctcttgttcttcacgactttgcacaggctgagcaccctttgcctctccccagaaacgtggatgaccagcaacggagcgccaagcagaacaccttgcaacaaggtctgtcgaagccggagcatacggcctggggtagcacaccttgggtgcagaagaatttgaacagtgcccgatctgcctgtggttgatgatgggctgtgtgttggatggcacattgatgcggatacgacgggccgaaaatccggaaacaccccacttctttgacccttgctcagcttttaatgatgttcttccaatgttccattacttttctgcccctctctgcccctgattcagacagcaactgtttgtgggagcgtttacattatagtgaatgttggccttgagtcgatttccctgatgggcgggccggaagaagcgagaagggggcgactttcgcatatcatcattacttgcaaatcttctctacctaccatccaccaaagttgtacacttgcagacgggcttctacacatacatgaaggaaacttgagagtgaacattattttcagcccttacgttctcgacgttcggtggacgaccaaccccctgtgaacaatttatggcatttatccgacctcctggctttggtatattcgggttgacgctttggtggttctgaagcttattcaaggttttcaaagtcatgtaacaaagatgagatgaaatgcccaaagtttgttttcgtcatgtcgtttctctggaagcacttcttgcttatggctggcttttggtgttggagggcatcggcaaacgggaccaaaacatatgcaatctcaatgaggacgttgaagctgtgccatactatgattctctgttatttctctttccttgttgggatggttggttgtctctcgccttttcttctctttttatttacaaacaggatacctcctacacttcacaatacccaatactttactattctttttgcaaa

SEQ ID NO: 4 - protein, 812 aa, Neurospora crassa
MAPSMSIPTQGGMFHTFQGVTPRKPAVDSRDSVKSNGSGAAKRITTPHACAECKRRKIRCDGQQPCGQCLSSRAPKRCFYDKHRQRVIPSRKTLEALSQSLEECRSILKRLYPHQEVHALLPLSRQELLNLLDRPVPDSTTANGLPSPPLNTTPMAESETPTKSENILEQIPTRDTEWDEERRERDHIPVEADDINALSLSVDRQASYLGASSIKAALMVMLKVQPGLRSSLAAPLNSIEISHNFPAIRQKSSSQKDPQRIPWSWKGQTLIDAYFKRVHVFIPMLDETTFRADYLEGQRFDAPWLALLNMVFAMGSIVAMKSDDYNHVNYYNRAMEHLPMDSFGSSHIETVQALALIGGYYLHYINRPNMANAVLGAAIRMASALGLHRESLAQGGSDMVAAETRRRTWWALFCLDTWATTTMGRPSFGRWGPAINIRPPEFGVNAGRDSSQHAGILPMIENVKFCKIATQIQDMLAISPLLRTEDRCNLDGQLVVWYENLPWLLRTTDPCAEPLYMARCIMKWRYQNLRMLLHRPVLLSMASSGLNPHTQACDADLAAIETCRELAAATIEDIGREWTRNQMSGWNAVWFLYQAAMVPLVSVFWQWGNPRVPEWLKQIEAVLELLEAMEEWSLAARRSREVVLRMYEASRVIQAQGAAAHQLQQRGSQSPHSLSSTTASLGNMHINNDLLMGSSPGSAELYMTPIDLEPVEGLGMTGVLDHGGMWDLDGMLWGPSPSPSVHHGQHSTHPDDAVPTVAEYAAAFPTADVVDGFLQHHSAMEFGNMMGHHHHHHHAGAHAGQGQFGGMDGYTY

SEQ ID NO: 5 - DNA, 2439 bp, Neurospora crassa
atggcaccatcaatgtcgatacctacacaaggcggcatgtttcacacattccaaggagtcacaccacgaaagccggctgttgactctcgagatagtgttaagtccaatggtagtggggcagccaagaggataactactcctcatgcttgtgctgagtgtaaaagacgaaagattcggtgtgatggtcaacaaccatgtggccaatgtctctcaagccgagcaccgaaacgttgtttctatgacaagcaccgccaaagggtgatcccatcgcgcaagacactcgaagccctctcccagtccctcgaagaatgccgatcgattttgaagcgactgtatcctcaccaagaagtccacgccttgcttcccttgtccaggcaagaactcctcaacctcctggatcgacccgtcccggacagcacaacagcgaacggactaccgtcacctcctctaaacacaacaccgatggccgagtcagagacaccaaccaagtctgaaaacattttggaacagattccgactcgggatacagaatgggacgaggaacgccgggagagggaccatatccctgtagaggcggacgatatcaacgcgctgtcactctcggtggacagacaagcttcttatcttggagcctcatccatcaaggctgcccttatggtcatgctcaaggttcaaccaggcttgaggagctccttggccgccccgctcaacagtatcgagatttctcataacttcccggccatcagacagaaatcatcgagtcagaaagatccccagcggatcccatggtcatggaagggacagacacttatcgatgcctacttcaagcgagtccacgtcttcatcccaatgctcgacgaaacaaccttccgtgccgattaccttgaaggtcaacgatttgacgcaccgtggttagccttgttgaacatggtattcgccatgggtagcattgtggcaatgaagtcggacgattacaatcacgtcaactattacaaccgcgccatggagcatcttcccatggattcctttggcagcagccatatcgagactgtccaagcattggcactcatcggtggttactatcttcactatattaaccgacccaacatggccaacgctgttttgggtgccgccatccgcatggccagcgctctcggtctccaccgtgagagtcttgcccaaggaggaagtgatatggtcgctgccgagaccaggagacgcacatggtgggctcttttctgccttgacacgtgggccacgacaaccatgggacgtccctcttttggccgttggggacccgccatcaacattcggccgcccgagttcggtgtgaatgccggtcgggactcgtctcaacacgcgggtattctccccatgattgaaaacgtcaagttctgcaaaatcgccactcagatccaagacatgctcgccatttctcctttgctgcgtaccgaggaccgctgcaatctggacggacagctcgttgtctggtatgaaaacctaccttggctcctgcgtacgaccgacccatgcgctgagccgctctacatggcccgctgcatcatgaagtggcggtatcagaacctccgtatgcttcttcatcgcccagtcctcctctccatggcctcatcaggtcttaacccacatactcaggcctgtgacgcggatctcgccgccattgagacgtgccgagagcttgctgcggcaaccattgaggacattggtcgtgaatggacacgtaaccagatgtccggctggaacgcagtgtggtttctctaccaggctgccatggttcctcttgtctccgtcttttggcaatggggcaaccctcgtgtccctgagtggctcaagcagattgaggcggtattggagctccttgaggccatggaagagtggtcactcgctgctcgcaggagccgggaggtggttcttcgcatgtacgaggccagcagagtcatccaggcacagggtgccgcagcgcaccaactacagcagaggggatcgcagagccctcattctctcagcagcactactgcgtccttgggcaacatgcacatcaacaacgacttgctcatggggtcgtcaccgggttcggcggagctctacatgactcctatcgacctggagcccgtcgaaggcttgggcatgacgggtgtgctggaccacggcgggatgtgggatctcgacggcatgctttggggtcccagtccaagcccgtcggttcaccatggtcaacactcgactcacccggatgatgcggtgcccacggtggcggagtacgctgcagcgttcccgacggctgatgtagtagatgggtttctgcaacatcactcggctatggagtttgggaacatgatgggtcaccaccaccaccaccaccatgcaggtgcacatgctggccagggtcagtttggaggtatggatgggtacacctactga

SEQ ID NO: 6 - DNA, 3442 bp, Neurospora crassa
ttatcacaacctggggctgaggctgaggtgaagtgcaatggaccaattcccaactcggttcaatgtaaatatataagtttgcatacgctcctcacggtctcggccaccccctcattgtcccccagggtctgtctttagtttgtttattattggcgaggacaaaatatcaatcttaagcccacacaaggttttcagttcctggtgatcaaggtctcgccactttcacgaactcgccggttgatattcgggccttgcttggcaacccatcatacatttataccttttctgtggctgcgagtggcttcccagctttccgcaagttgtattcccattcagacagcctctgatcagcaaagcgtccataatggcaccatcaatgtcgatacctacacaaggcggcatgtttcacacatgtaagtttgatgaccttttccaaccaaggggtccattactaatgagcaaatccagtccaaggagtcacaccacgaaagccggctgttgactctcgagatagtgttaagtccaatggtagtggggcagccaagaggataactactcctcatgcttgtgctgagtgtaaaagacgaaagatgtaagtcaatgcgtgtcgatcagcctcaccatcaatctaacttgagtgccctagtcggtgtgatggtcaacaaccatgtggccaatgtctctcaagccgagcaccgaaacgttgtttctatgacaagcaccgccaaagggtgatcccatcgcgcaagacactcgaagccctctcccagtccctcgaagaatgccgatcgattttgaagcgactgtatcctcaccaagaagtccacgccttgcttcccttgtccaggcaagaactcctcaacctcctggatcgacccgtcccggacagcacaacagcgaacggactaccgtcacctcctctaaacacaacaccgatggccgagtcagagacaccaaccaagtctgaaaacattttggaacagattccgactcgggatacagaatgggacgaggaacgccgggagagggaccatatccctgtagaggcggacgatatcaacgcgctgtcactctcggtggacagacaagcttcttatcttggagcctcatccatcaaggctgcccttatggtcatgctcaaggttcaaccaggcttgaggagctccttggccgccccgctcaacagtatcgagatttctcataacttcccggccatcagacagaaatcatcgagtcagaaagatccccagcggatcccatggtcatggaagggacagacacttatcgatgcctacttcaagcgagtccacgtcttcatcccaatgctcgacgaaacaaccttccgtgccgattaccttgaaggtcaacgatttgacgcaccgtggttagccttgttgaacatggtattcgccatgggtagcattgtggcaatgaagtcggacgattacaatcacgtcaactattacaaccgcgccatggagcatcttcccatggattcctttggcagcagccatatcgagactgtccaagcattggcactcatcggtggttactatcttcactatattaaccgacccaacatggccaacgctgttttgggtgccgccatccgcatggccagcgctctcggtctccaccgtgagagtcttgcccaaggaggaagtgatatggtcgctgccgagaccaggagacgcacatggtgggctcttttctgccttgacacgtgggccacgacaaccatgggacgtccctcttttggccgttggggacccgccatcaacattcggccgcccgagttcggtgtgaatgccggtcgggactcgtctcaacacgcgggtattctccccatgattgaaaacgtcaagttctgcaaaatcgccactcagatccaagacatgctcgccatttctcctttgctgcgtaccgaggaccgctgcaatctggacggacagctcgttgtctggtatgaaaacctaccttggctcctgcgtacgaccgacccatgcgctgagccgctctacatggcccgctgcatcatgaagtggcggtatcagaacctccgtatgcttcttcatcgcccagtcctcctctccatggcctcatcaggtcttaacccacatactcaggcctgtgacgcggatctcgccgccattgagacgtgccgagagcttgctgcggcaaccattgaggacattggtcgtgaatggacacgtaaccagatgtccggctggaacgcagtgtggtttctctaccaggctgccatggttcctcttgtctccgtcttttggcaatggggcaaccctcgtgtccctgagtggctcaagcagattgaggcggtattggagctccttgaggccatggaagagtggtcactcgctgctcgcaggagccgggaggtggttcttcgcatgtacgaggccagcagagtcatccaggcacagggtgccgcagcgcaccaactacagcagaggggatcgcagagccctcattctctcagcagcactactgcgtccttgggcaacatgcacatcaacaacgacttgctcatggggtcgtcaccgggttcggcggagctctacatgactcctatcgacctggagcccgtcgaaggcttgggcatgacgggtgtgctggaccacggcgggatgtgggatctcgacggcatgctttggggtcccagtccaagcccgtcggttcaccatggtcaacactcgactcacccggatgatgcggtgcccacggtggcggagtacgctgcagcgttcccgacggctgatgtagtagatgggtttctgcaacatcactcggctatggagtttgggaacatgatgggtcaccaccaccaccaccaccatgcaggtgcacatgctggccagggtcagtttggaggtatggatgggtacacctactgaaggcccctcgcagtgctccaattttctagtttactactcatttctctctttctttctttctttcttcctcttttcacacaaaaaatagttgggctggaagcccggggttatgcacagttggcgcgacgcaggcttgaaggaccgaaataccaccacatacgatggctggatgcgggtggtgcggatttggcttacgaatggttgctttttgcggggtacatcatatacggagaaggataagggtctcatggtaaaaaggaaaagggagctttgttttttggcggttgatttctcagggaatgttggtttgatttttggctgattttggatggttacaacggcgccttcgcgggtacactctccctcttgttaggtgtagtgtcccacctcccttccattcaccagccaccggccttacctaggccgttgtcatgtgggcctagttcagggcaccaccatgttcattgtattattattatagccctttttacatttcatttccactttagcttcttaacacagtcatcaac

SEQ ID NO: 7 - DNA, 18 bp, Artificial Sequence
  Synthetic Construct
atgacgccgaaccgagtg

SEQ ID NO: 8 - DNA, 19 bp, Artificial Sequence
  Synthetic Construct
caacaacaccagaatgcgg

SEQ ID NO: 9 - DNA, 18 bp, Artificial Sequence
  Synthetic Construct
tcccggccatcagacaga

SEQ ID NO: 10 - DNA, 19 bp, Artificial Sequence
  Synthetic Construct
atcggcacggaaggttgtt

SEQ ID NO: 11 - DNA, 18 bp, Artificial Sequence
  Synthetic Construct
tgatcttaccgactacct

SEQ ID NO: 12 - DNA, 18 bp, Artificial Sequence
  Synthetic Construct
cagagcttctccttgatg

SEQ ID NO: 13 - DNA, 19 bp, Artificial Sequence
  Synthetic Construct
atctgggaagcgaacaaag

SEQ ID NO: 14 - DNA, 18 bp, Artificial Sequence
  Synthetic Construct
tagcggtcgtcggaatag

SEQ ID NO: 15 - protein, 614 aa, Aspergillus clavatus NRRL 1
MTPSPERDLVLDSASTAAIGEFQVSKKKRSSSELAEYPRRRATIACQICRLRKTREPGIKLDAGDKLIIERLNRIEGLLQSNLLGQASHFPLSSTSPATSNDTNVGSDDAAAKASTIAAMSGRTSIAGLASWANPPTSISTMPKVHTTPALHLLQWPLIRDLIAGPYDAQALLQLEMAREPLRIPTSVGFDLTNSATYVQAFFEKVNVWYACVNPYTWTTYHNKAVSRSFQEGPESCVVLLVLALGSASHYGSIAFIPPDMEPPGLPYFAAAWNLLPSVMMRNSVIAAQCVVLASAYLFYLVRPLEAWTLLSNASMKLQLLFGDPARVPLQWRELSVRVYWNALLYESDLLAELDLPHSGIIHFEELVDLPGGFEEEVEEDEDDIENSDRESAPVNGSAGREELWYFLAEIALRRLLNRVSHLLYQKDSSLTLGSLGPIVSELDFQLSQWYDNLPQPVQFPLNHAPISNPVQTVLRLRYYACRTIIYRPYIQAVFENEQAAADQVVRERCRRCLEATLRQLENITSHREGHLPYLWQGALSMVSQTLLIMGATMSPGLSTLLPPGFRVDAIISSVITEVGRYAHLAPSLKLSAEIIRDAEKRRKICLRSTTGRV

SEQ ID NO: 16 - protein, 495 aa, Aspergillus flavus NRRL3357
MSGKTSVVGLASWANPPTSISTMPKVHTTPALHLLQWPLIRGLVAGPYDPHTLLQLEMAREPLRMKAPKELDLTNATIYIRNFFRRVNVWYACVNPYTWSRYYKTAVSLSFREGSESCLVLLVLALGCASHYGSISSVSPDKEAPGLPYFAAAWDLLPIVMMRNSVPAAQCIILASAYLFYLVRPLEAWTLLSNASLKLQLLFGNPSRVPLQWKELSVRIYWNALLYESDLLAELDLPHSGIVHFEELVDLPGGFEEEDDEEYQEAEDAHGEIASETEPVGHDELWYFLAEIALRRLLNRVSHMVYQKDSPLTLGTLGPIVSELDYQLSQWYESLPQPVQFPLSRTPVSNSVQTALRLRYFACRTIIYRPYMLAVFENEQTSLDPVVKECCRRCIEATIHQLENITSHREGHLPYLWQGALSMVSQTLLIMGATMSPTLSALLPPADQVDRMISEVVAEVERYAHLAPSLKLSAEIIRDAEKRRQICLRSTGRCT

SEQ ID NO: 17 - protein, 651 aa, Aspergillus niger
MSCQELDSDTILDSTSAKKRNNSEATEYPRRRATIAYHPVPSHFLSPGTSSATKTSNTNVRALLQCQICRLRKTRCNGARPRCQLCVDLDADCVYREPGIKLDAGDKLIIEKLNRIEVLLQSKFADPIGQSPLSSNSSTAANLVQISSDDAVSLANIPTRTIAVGLGSWANPPTSISTMPRVHTTPALHLLQWPLIRELVAVPYDPHTLLQLEMAREPLRLEPPVSLDLSNALTHARLFFERVNVWYACVNPLTWPRYYKMALSRDFERGPESCVVLLVLALGSASQYGSISCLSADEELPGLSYFSAAWTLLPAVMTRNSVLAAQCVILASAYLFYMVRPLEAWTLLSNASMKLQLLLGNPSRVPGQWKELSTRVYWNTLLFESDLLAELDLPHSGIVHFEELVDLPGGFEPEDEEDEEDEGSIRIEEKLVDAMIGQDELWYFLAEIALRRLLNRVSHMIYQKDSILTLASLGPIASELDFQLSQWYESLPQPVRFPLSGGPTLSPIQTVLRLRYFACRTIIYRPYILAVFQNEYACSDPTVKDCCLRCLDATLNQLEHIDRHREGHLPYLWQGALSMVSQALLIMGATMSPTLSSLLPPATQLDGIISGVITEVGRYARLAPSLKLSAEIIRDAEKRRQVSLASAARRG

SEQ ID NO: 18 - protein, 638 aa, Aspergillus oryzae RIB40
MSPSPQRDRDTHVEAVAAVTASDDFQSSKKKRSNSDVVEYPRRRATIACQICRLRKTKCNGARPKCQLCTDLDTECVYREPGIKLDAGDKLIIERLNRIEGLLQSSLASQAAHCSLPSTSPATSNDTNIGGEDTPVKTSSVAVMSGKTSVVGLASWANPPTSISTMPKVHTTPALHLLQWPLIRGLVAGPYDPHTLLQLEMAREPLRMKAPKELDLTNATIYIRNFFRRVNVWYACVNPYTWSRYYKTAVSLSFREGSESCLVLLVLALGCASHYGSISSVSPDKEAPGLPYFAAAWDLLPIVMMRNSVPAAQCIILASAYLFYLVRPLEAWTLLSNASLKLQLLFGNPSRVPLQWKELSVRIYWNALLYESDLLAELDLPHSGIVHFEELVDLPGGFEEEDDEEYQEAEDAHGEIASETEPVGHDELWYFLAEIALRRLLNRVSHMVYQKDSPLTLGTLGPIVSELDYQLSQWYESLPQPVQFPLSRTPVSNSVQTALRLRYFACRTIIYRPYMLAVFENEQTSLDPVVKECCRRCIEATIHQLENITSHREGHLPYLWQGALSMVSQTLLIMGATMSPTLSALLPPADQVDRMISEVVAEVERYAHLAPSLKLSAEIIRDAEKRRQICLRSTGRCT

SEQ ID NO: 19 - protein, 637 aa, Aspergillus terreus NIH2624
MSPSPDRDRDTVLDPAIVAASIDFPDGKKKRSNSEATEYPRRRATIACQICRLRKTRCNGARPRCQLCTDLDADCVYREPGIKLDAGDKLIIERLNRIEGLLQSSLVGQHPPFPQSSTSPATSNDTNLGSDDMVNKSSLTSLSGRTSVAGMASWANPPASISTMPKVHTTPALHLLQWPLIRDLVAGPYDPHTLLQLEMAREPLRMTTVAGLDLSNANTYVQSFFERVNVWYACVNPYTWSQYHKRAMAQGFQEGAESCVVLLVLALGCASHYGTISSIPPDREAPGLPYFTAAWNLLPSVMMRNSVLAAQCIILSSAYLFYLVRPLEAWTLLSNASMKLQLLFGNTSRVPAQWKELSVRVYWNALLYESDLLAELDLPHSGIVHFEESVDLPGGFEEDDEEEEDEDPVENPHNGMIHSDSVGNDELWYFLAEIALRRLLNRVSHMIYQKDNTLTLASLGPIVSELDFQLSQWYDSLPRPVQFPLAHTPFSNPVQTVLRLRYYACRTIIYRPYILAVFENEQTSADPLVKECCRRCLEATLRQLEDITSHREGHLPYLWQGALSMVSQTLLIMGATMSPALAALLPPPIRVDGIIAGVMAEVDRYAHLAPSLRLSAEIIRDAERRRQVWIRSSGKRL

SEQ ID NO: 20 - protein, 507 aa, Metarhizium acridum CQMa 102
MSASRDKAYNPMARSRLLSQFSDKAPATPLQLANSDGLLSSLRGNEVILLLIILGAEQLLLLFVIDAYMGFLWRQCEVCRSRKSRCDGSKPKCKLCAELGAECVYREPGVKLDAGDKLILEQLNRTENLLQINLVTNQASGLHLSQSSPSVSNGTASGGDQALLSNSSNTASTIPNGGLGTWGRNGFVERLSGRPRELYRATSASTWQRKPPRNMITTKNVLAAQCHLLAAAYLFYLVRPLEAWNLLCTTSTKPQLPLMAPHRISQRQRELVERTYWNTLLLESDVLAELDLPHFGIVQFEKNVGLPGGFEGEEQGQEQIGHDDLWYFLAEIALRRLLNRANQLIYSKDSVASTTSPEPVVAELDYQLTQWYEGLPPSLQFPFSRTMLHDPIQAVLRLRFYACKTIIYRPYILAVLENEQAVLDPAVRGCCHKCLEASVRQLEHIMEHHAGQMSYIWQALDDLISEVITGVQNYASLAPSLRLAVSMARVREPRFVLSQRRAISPGQ

SEQ ID NO: 21 - protein, 602 aa, Mycosphaerella graminicola IPO323
MDQDLAFDEIPDYPRRRAMIACEICRSRKSKCDGSRPKCKLCIDLNAACVYREPGVKLDAGDKIILDRLANIEALIQSKFPTLSQADSSTAGPLALPAEQGRTVGNGPGSIPLSGFGISQAAMNISTMPKAHTTPALHLLQWPCICDLVTSPCDPQVLLQLEMTRPPLDLRSHYPLDLSDLCSSIYTRAFFGKVNVWYAVVNPHSWNELYRTASLNSFRSGPESCVVLLVFALGQAAHTDTSTAHASYDGRPPGTAYFEAAWQLLPTLMLRNNVMSAQCHILAAAYLLYLVRPLEAWNLLCSVSIKLQLLLSSSSPLPSAEARNLLERIYWNTLMFESDLLAELDLPHSGIVQFEESMPLPRSFPLTPISPSPSSSAPAPSPGSDEIWYFLAEIALRRLLNRVSHLLYSKSLSLASLAPLVTELDLQLTQWHNHLPPSVQFPIRPSSSLPDEALDPVQTVLRLRYHACRTIIHRPYILYVLSSATPTVGNSTSHISEACATGLESAYIQISLLSSHRAGHVPYLYQGFLSLVSQTLLLLGASLHTELRRLMPVRKEALVKTVDSVRIELNTLGRLAPSLEVSGGILGDAVDRWKERISGVEW

SEQ ID NO: 22 - protein, 495 aa, Neosartorya fischeri NRRL 181
MSGRTSVAGLGSWVNPPTSISTMPKVHTTPALHLLQWPLIRDLVARPYDPQTLLQLEMAREPLRFPSAAGFDLSNTTTYVQSFFERVNVWYACVNPYTWTRYYSKAVSLGFREGPESCLVLLVLALGSASHYGSISFIPSDMDPPGLPYFATAWNLLPSVMMRNSVLAAQCIILASAYLFYLVRPLEAWTLLSNASMKLQLLFGDPARVPLQWRELSVRVYWNALLYESDLLAELDLPHSGIVHFEEVVDLPGGFEEEEDEEDDEADNEDRQTSLVEGSVGREELWYFLAEIALRRLLNRVSHMIYQKDNSLTLGSLGPIVSELDFQLSQWYESLPQPVQFPLSHTPISNPVQTVLRLRYYACRTIIYRPYILAVFENEHAATDQVVRECCRRCLEATLRQLENITSHREGHLPYLWQGALSMVSQTLLIMGATMSPGLSTLLPPGFRVDAIISSVMAEVERYAHLAPSLKLSAEIIRDAEKRRQICLRSTSRRV

SEQ ID NO: 23 - protein, 633 aa, Aspergillus fumigatus Af293
MTPSPERDLVLDSATAGGTTESQVSKKKRSNSELTEYPRRRATIAICRLRKTRCNGARPRCQLCTDLDADCVYREPGIKLDAGDKLIIERLNRIEGLLQSTLVGQATHLPLSSTSPTTSNDTNAGSDDAVAKASTIAAMSGRTSVAGLGSWVNPPTSISTMPKVHTTPALHLLQWPLIRDLVAGPYDPQTLLQLEMAREPLRLPSAAGFDLSNTTTYVQSFFERVNVWYACVNPYTWTRYYSRAVSLGFREGPESCLVLLVLALGSASHYGSISFIPSDMDPPGLPYFAAAWNLLPSVMMRNSVLAAQCIILASAYLFYLVRPLEAWTLLSNASMKLQLLFGDPARVPLQWRELSVRVYWNALLYESDLLAELDLPHSGIVHFEEVVDLPGGFEEEEDEEDDEADNEDRQSSLVEGSVGREELWYFLAEIALRRLLNRVSHMIYQKDNSLTLGSLGPIVSELDFQLSQWYESLPQPVQFPLNHTPISNPVQTVLRLRYYACRTIIYRPYILAVFENENAATDQVVRECCRRCLEATLRQLENITSHREGHLPYLWQGALSMVSQTLLIMGATMSPGLSSLLPPGFRVDAIISSVMAEVERYAHLAPSLKLSAEIIRDAEKRRQICLRSTSRRV

SEQ ID NO: 24 - protein, 632 aa, Aspergillus nidulans FGSC A4
MSSSPERDREGILDSTSASLNELINKKRSNSEATEYPRRRATIACQICRLRKTRCNGARPKCQLCTDLDAECVYREPGIKLDAGDKLIIERLARIEGLLQTSLAAQNSQLTLSSTSPATSNGTNVGSDDTVAKASTHLAVTGRTTSIVGLASWANPPTSISTMPRVHTTPALNLLKWPLIRDLVARPYDSQTLLQLEMAREPLKMTPPMAVDLSCAPLYIRTFFEKVNVWYACVNPYTWSKYYDAAVSLSFREGPESCVVLLVLALGCAAQCGSIALISTDRDPPGVPYFIAAWNLLPSVMMRNSVVAAQCIILAAAYLFYLVRPLEAWTLLSNASMKLQLLFGNPSRVPVQWRELSVRVYWNALLYESDLLAELDLPHSGIVNFEELVDLPGGFDEIEDDEDEDDGDTGNKLVSPIGCDELWYFLAEIALRRLLNRVSHMLYQKDNSLTLASLAPIVSELDFQLSQWYEGLPQPVRFPLSHAPISHPVQTVLRLRYFACRTIIYRPYILAVFENEQASGDSWVRECCRRCLEATLYQLESVTTHREGHLPYLWQGALSMVSQSLLIMGATMSPALSSLLPPTLRVDEIISSVIVEVDRYAHLAPSLKLSSEILRDAERRRQICLRSSGSRV

SEQ ID NO: 25 - protein, 651 aa, Aspergillus niger; identical to SEQ ID NO: 17

SEQ ID NO: 26 - protein, 638 aa, Aspergillus oryzae RIB40; identical to SEQ ID NO: 18

SEQ ID NO: 27 - protein, 535 aa, Botryotinia fuckeliana B05.10
MSISSQGNSPNSTSGSIRHFSMSRDKFDIDISSPQLSIVTNSDLTSPTSLKSPNGRRIATFSREGILGSAQKARNLSQSSADRESITNALQSRQNHNHNHNQNQNRNGNGNTNGNGNQNGNSDDGINPLKRRSTDAGIDYPRRRATIACEICRSRKSRCDATKPKCKLGTELGAECIYREPGIKLDAGDKLILEHLTRIEGLLQSTLIGQTSNLALSTGSPSINGGTTASGEDLLMAASGGFASMIPATGLGTWAIPTNISTMPKIHTNAALHLLQWPLIRDLVSRPYDPQILLQLEMAREPLALSKAPCLDLSNTSAYIEAFFAKVNVCTSTKLQLLLSAPGRIPASQRELCERVYWNSLLFESDLLAELDLPHSGIVQYEEIVGLPGGFEQEDEDGVGRDELWYFLAEIALRRLLNRVSQLIYSKDSMASTSSLEPVVAELDFQLSQCHAGHMPYLWQGALSIVSQTLLVMGATMSPSLSAIINSLVIHDTIDGIINDVVMEIERYAHLAPSLSLSAEIIREAEMRRRSYLGG

SEQ ID NO: 28 - protein, 704 aa, Chaetomium globosum CBS 148.51
MSPSSNGDSPHSVTATMTTAASATVVRQQYPLPNRDFTVDIPSPQLAAGSNGAGLLKSPNSLKAARAASNFSREGILGSAQKARNLSQSSDNRPDGVPNGIPKSTSEESINPLKRRNTDAAVDYPRRRATIACEVCRSRKSRCDGTKPKCKLCTELGAECIYREPGIKLDAGDKLILERLNRIENLLQMNMVGHGNGISLSHDSPNMSNGTALSGDNLMMRNANNEFVSIIPSGGLGTWSATATNISTMPKVHTNAALHLLQWPLIRDLVSRPYDPQILLQLEMAREPLHSLAKTPCVDLSNTNAYIEAYFDRVNIWYACVNPYTWRSHYRIALSNGFREGPESCIVLLVLSLGQASLRGSISRIVPHEDPPGLQYFTAAWSLLPGMMTSNSVLAAQCHLLAAAYLFYLVRPLEAWNLLCTTSTKLQLLLMTPNRVPADQRELIERIYWNSLLFESDLLAELDLPHSGVVAFEENVGLPCGFEGDEQEAVGRDELWYFLAEIALRRLLNRVSQLIYSKDSMASTTSLEPVVAELDFQLTQWYESLPVPLQFPFTRTMLADPVQTVLRLRFFACRTIIYRPYILAVLDNEQAILDPAVRDSCTKCLEASVRQLEHIAAHHAGHMPYLWQGALSIVSQTLLVMGATMSPSLSSILWSLVPHREAIDQIINDVVMEIERFAVLSPSLSLSAEIIKEAEVRRRTFLSG

SEQ ID NO: 29 - protein, 696 aa, Gibberella zeae PH1
MSPSSTGESAHSISINSARPFTVPARDSFALDLPMSSLATMSADASLKSPVSYKNQRTPSFSMVTSQKARHLSQSSDNNRPDNMSNGGQKVSSDEGSNPLKRRNTETGVDYPRRRATIACEVCRSRKSRCDGTKPKCKLCTELGAECIYREPGIKLDAGDKLILERLNRIESLLQMSMVNTTANGLGLTENSPGMSNGTGLDGDNLILSANAATFSSIPNGGFGTWSAQPVGTNISTMPKVHTNAAMHLLQWPLIRDLISRQCDPQVLLQLEMAREPLHTLTKTPCVDLSNTQAYIEAYFERVNIWYACVNPYTWRSQYRTALSNGFREGPESCIVLLVLALGQASLHGSISRILPHEDPPGLQYFTAAWSLLPGLMTANSVVAAQCHLLAAAYHFYLVRPMEAWNLLCTTSTKLQLLLMAPSRIPSHQRELVERIYWNALLFESDLLAELDLPHSGVVQFEEHVGLPGGFEGDESEQVGRDELWYFLAEIALRRLLNRVSHLIYSKDSIANTQSLDPVVAELDYQLSQWYESLPLPLQFPFTRNALQDPVQTVLRLRFFACRTIIYRPYILAVLDNEQQVLDPAVRENCHKCLEASLRQLEHIHEHHAGHMPYIWQGALSMVSQTLLIMGATMSPSLLNILLTLVPSREALDQIINDVVMEVERYATLAPSLSLASEMLKEAEYCFSIISPRVLD

SEQ ID NO: 30 - protein, 692 aa, Glomerella graminicola M1.001
MSPSSTGDSPCSATGNAGRPFHVPSRETFNIEVPSPSMTNGIHPLKSPTSLKTQRTPSFSRDGILGSAQKARNMSHSSENRPEALANGMDKAPSDEGSNPLKRRNTDAGIDYPRRRATIACEVCRSRKSRCDGTKPKCKLCTELGAECVYREPGIKLDAGDKLILERLNRIESLLQMNMVAGQGNGIAINQESPSMSNGSGLNGESIMGVSGSGNIVSVIPNGGLGTWNNPTNISTMPKMHTNAALHLLQWPLIRDLVSRPYDPQVLLQLEMAREPLHSLTKTPCVDLSNTTAYIEAYFERVNVWYACVNPYTWRSHYRTALSNGFREGAESCIVLLVLALGQASLRGSISRIVPGEDAPGLQYFTAAWALLPGMMTSNNVLAAQCHLLASAYLFYLVRPLEAWNLLCTTSTKLQLLLMSPNRVPPNQRELTERIYWNSLLFESDLLAELDLPHSGVVQFEENVGLPGGFEGEEQEAIGRDDLWYFLAEIALRRLLNRVSQLIYSKDSMASTTSLEPVVAELDFQLTQWYESLPMPLQFPFTRNLLSDPVQTVLRLRFFACRTIIYRPYILAVLDNEQAVLDPAVRDSCHKCLEASIRQLEHISQHHAGHMPYLWQGALSIVSQTLLVMGATMSPSLSSILLTLVPHRETIDQIINDVVMEIERYSTLAPSLSLAAEIIKEAEVRRRAYLSG

SEQ ID NO: 31 - protein, 696 aa, Grosmannia clavigera kw1407
MPTSNSPTVATAVTAATARHSSAMDASDGGLSVDAGSPQRSVGLGRDGILSAPSSDGSDVNSPSLAGTIGAAPPSASSQAGLVTDANPLKRRNADASADYPRRRAMIACEVCRSRKSRCDGTKPKCKLCTELGATCIYREPGIKLDAGDKMILERLGHIENLLQMNLADAISSSSTQQQQQSPRRESSALSTLWPSIAAETSPFVSVVPASTIGTWSSTTNISTMPKVHTNAAMHLLQWPLICDLVTQPYDPQILLRLEMARESLPSLAQTPRIDLSNMAAYITAYFERVNVWYACVNPYTWHNLYGTALANGLREGPESCIVLLVLALGQAGLGGSISRLVPRCDPPGLSYFTAAWALLPAMMTSNSVLAAQCHLLAAVYLFYLVRPLEAWNLLCTTSTKLQLLLMVPDRVPSGQRELTERIYWNALLFESDLLAELDLPHSGIVQLEENVGLPCGFEGRDPTDSQQATTLDSTAAGRDDLWYFLAEIALRRLLNRVSQLLYARDAAASPASLGPIVAELDYQLTQWYDNLPAPLQFSFASVPLADRVQTVLRQRFFACRTIIYRPYILAVLDREQGREQAVMLEPAVRAACHHCLESAVRQLENVTANQDGHMPYLWQAALSFTSQALLVMGASMSPSLADILLSIVPSRAMLDQLMANVVAETARYAILAPSLSLAADIVRQAEARRREYLGG

SEQ ID NO: 32 - protein, 710 aa, Leptosphaeria maculans
MAGITPSPDVSPVSAATTNGQFPRDSFCLNLSTLPDASSFLLKSALRSPHLLESPNGLFSGCGGLSNPFRKRPRNMSQSSGTDREMSSDTPPAQTNGIAPTSNGANGTDSRPSSKKRPSTDTIDYPRRRATIACEICRSRKSRCDGTRPKCRLCTELNAECIYREPGIKLDAGDKLILEHLNRIEGLLQTGLTSGFSLSSHSPTASNSTSEDFLGRSTGTMSHLGMVQPINGIGTWTNHPLNISTMPKTHNTAALNLLSSPMIRELVSRQYDAKILLQLEMSRDSVSLGTSRGLDLSNTGAYVQAYFERVNVFYACVNPYTWSSHYQTALSHGFRDGPESCIVLLVLALGHAGSTGSITQQDPTKDPPGMAYFAAAWNLLPTVMTRNNMVAAQCQILAAAYLVYLVRPVEAWNVLSGASMKLQLLLSAPGRISPAEEELGKRVYWNAVMIESDLLAELDLPHSGIAQFEEGFSLPTGFEDLGTEAVGRDELWYFLAEIALRRLLNRVSSMLYIRTTPYSKGPAATSIAQLDPLVIELDFQLNQWYAGLPRAMQFPLDRVPLQNPVQTVLRLRYFACRTIIFRPYVLLVLQDESLAMDSSVQDNCHKCLEACVRQLEYITAHHAGHLPYLFQGALSIISQTLLIMGATMTPSLSQLLPPPATMDDIINNVVLEMERYAHLAPSLRLSAEIIREAEGKRQLWLRTAGLKFEV

SEQ ID NO: 33 - protein, 642 aa, Magnaporthe oryzae 7015
MSPSSTGESPPTILNGHSAPALNTSNPPSALKSPATVKSQRTPSFSRDSILGSALKAGASQRADFSGDGRLGDPNGLQKVSSDEGSNPLKRRNTDAGVDYPRRRATIACEVCRSRKSRCDGTKPKCKLCLELGADCVYREPGIKLDAGDKLILERLNRIESMLQMTLPPNGIGLGGSPNLSNGTGHLSADGILTGGPFLSVMPNAALSQWATAPNISTMPKVHTNAALHLLQWPLIRELVSRPYDPQILLQLEMAREPLHSLTKTPCVDLSNTAAYIEAYFERVNVWYACVNPYTWRSHYRIALSNGFREGPESCIVLLVLALGQASLKGSISRIVPHEDPPGLQYFTAAWALLPGMMTSNSVLAAQSHLLAAAYLFYLVRPLEAWNLLCTTSTKLQLLLMSPSRVPSDQRELTERIYWNSLLFESDLLAELDLPHSGVVQFEENVGLPGGFEGDENEAVGRDDLWYFLAEIALRRLLNRVSNLIYSKDSMASTTSLEPVVAELDFQLTQWTIIYRPYILAVLDNEQAVLDPAVRDSCHKCLEASIRQLEHIAAHHAGHIPYLWQGALSIVSQTLLVMGATMSPSLSSILSTVVPHRETLDQILSEVIIEIERYAVLAPSLSLAADILKEAEVRRRAFLMSG

SEQ ID NO: 34 - protein, 699 aa, Nectria haematococca mpVI 77134
MSPSSTGESPHSASMTAAARPFAVPSRDSFSLEIPAASLTAMSNELGIKSPVTFKNQRTASFSRDTMLSSAQKPRHLSQSSENRTDTMTNGTQKLPSDEGSNPLKRRNTETGVDYPRRRATIACEVCRSRKSRCDGTKPKCKLCTELGAECIYREPGIKLDAGDKLILERLNRIESLLQMSMVSTSPNGLNLTQDSPGMSNGTGLSGDNLVMAVNPTNFVSIPNGGFGTWSAQPIGTNISTMPKVHTNAAMHLLQWPLIRDLVSRPYDPQILLQLEMAREPLHSLTKTPCVDLSNTQAYIEAYFERVNVWYACVNPYTWRSQYRTALSNGFREGPESCVVLLVLALGQASLHGSISRIVPQEDPPGLQYFTAAWSLLPGMMTANSVVAAQCHLLAAAYHFYLVRPMEAWNLLCTTSTKLQLLLMAPSRIPSHQKELVERIYWNALLFESDLLAELDLPHSGVVQFEENVGLPCGFEGEESEQAVGRDELWYFLAEIALRRLLNRVSQLIYSKDSIASTTSLEPVVGELDYQLTQWYESLPLPLQFPFTRTVLQDPIQTVLRLRFFACRTIIYRPYILAVLDNEQAVLDPAVRENCHKCLEASIRQLEHIHEHHAGHMPYIWQGALSMVSQTLLIMGASMSPSLLGILLTLVPHREALDQIINEVVLEVERYATLAPSLSLAAEIIKEAEVRRRAFLGTP

SEQ ID NO: 35 - protein, 760 aa, Neurospora crassa
MRTVQGSACAFPLPVTTAEIASHGCGRCKELDAPCVYDEPPAPHHRPRSSTTDTPPSDILSRLSALEDRINARGTEASRQHATQDDGDDIDAQEDTRESNGSSSNGPLDPPTMTGLPRSHQENVHVDGMGEVQLTDDGENCTYFGPSSNVALVRQLSLALTRAQSQTSRSRAMPTSATSLASSRYSSLQQPRSESGRQDPLNGGVKAGSRPGHHVPPEPEATNIIHEYFSTIGLFFPVIHQDSFMSTYNDLRKKGFMGARRVWLALLYMIIATVYRTNSPSTPSETSAETSERYFQWAKDLVMPQFLISSSLETVQLLCLMIEYLHGSSQSAQLWTLHSLAVKSALQIGLHSADASRHLTLLEREMRKRTWFLIFMNDNNLSAKFGRPMTIPPSLQKRLEPPLDINEHFPTMYASRAVIATSVDAFKCGVQLSHITCQLVSQLYDDNAGGSSLNHVNTFDTLRLAFDFSWKLSQWHQSVPPDLRPQNLTTETPPPVLESSSSSSSPSIEAQRLRAVLGLRYYGLCTLVERPVLLKFLGFQPEPGHGQGDVDTNVALLRESGVVSLRRCIRACRECIALAKAIVDRWQNQKVLLSGAWWLTAYHAFGASLTLYTVLLIAGTKPSFSNLLSDSELTTVRSALSDAVDLLSRFGENSLVISRCHDCLVNFLRAYDLVVVEQQRQQKQQQESQSTTVAATVQTSRNSDHTSSSQSLPPQGQGQGVHVNVIGDGNGVSLTSSSSSSSSSGGYCHEDQLPSSPAVI

SEQ ID NO: 36 - protein, 671 aa, Penicillium chrysogenum Wisconsin 541255
  VARIANT 58: Xaa = Any Amino Acid
MTLPPENETVDPIGDYAVSDTSIGKKKRSNTEAAEYPRRRATIAVRVSSLWHIRSRQXLTLIQCQICRLRKTRCNGARPKCQLCTDLNAECVYREPGIKLDAGDKLILDHLARIESLLHSNLPNQGPQLALPATSPATSNDTTIGSDDPSSKASSSGLPVHGKLSAVGLGSWVNLPASLSISTMPKMHTTPALHLLQWPLIRDLVSGACDPQHLLQLEMAREPLRLTPNSGFDLTNASTYAQAFFNYGNVWYACVNPYTWNRYYQSALAQGFQEGPMSCLVLLVLALGSASHSGSISFVSPDREPPGLPYFAAAWSFLPSVMMRNTVIAAQCMVMASAYLFYLVRPLEAWTLLSSVSMKLQLLFGSPNRIPSQWRELSVRVYWNALLFESDLLAELDLPHSGIVNFEELVDLPGGFEEEDEDDGDEEDGDHNEGEERRIARKYQGSSRPVDSQLAVRRDELWYFLAEIALRRLLNRVSHIIYQKDSTHTLASLGPIVSELDFQLSQWYDSLPRPVQFPLTPKPLSNPVQTVLRLRYNACRTIIYRPYILAVFENEQAGADPGVIECCRRCLDATLRQLEHITSHREGHLPYLWQGALSMVSQTLLIMGATMSPTLSILLPPVAQIDAIIAGVVNEVERYAHLAPSLKLSAEIIRDAETRRQICLRSANMCL

SEQ ID NO: 37 - protein, 598 aa, Phaeosphaeria nodorum SN15
MSQSSGTDREMSSDLTPPAQSNGTAPTSNGANGTHSEPRPSTKKRPSTDTIDYPRRRATIACRLCTELNAECIYREPGIKLDAGDKLILEHLNRIEGLLQTSITSGFSLSSHSPAVSNTTSEDFLARSSGTIPHLGMVQPINGIGTWTNHPSNISTMPKTHNTAALNLLASPMIRELVSRQYDAKILLQLEMTREPVSFSSSRGLDLSNTGTYVQAYFERVNVFYACVNPYTWSNHYQTALAHGFRDGPESCIVLLVLALGHAGSTGSITQQNPEKEPPGLAYFAAAWSLLPTVMTRNNMVAAQCQILAAAYLVYLVRPVEAWNVLSGASMKLQLLLSAPGRVSPAEEELGKRVYWNAVMIESDLLAELDLPHSGIAQFEEGFSLPTGFEDLGMEVVGRDELWYFLAEIALRRLLNRVSSMLYIRTTPYSKGPAATSVAQLDPLVVELDYQLNQWYAGLPQAMQFPLDRVPLQNPVQTVLRLRYFACRTIIFRPYVLLVLQDETLALDSSVQDNCHKCLEACRIMQDISLTCSKVLCPSLSQLLPPPSTMDDIINNVVLEMERYAHLAPSLRLSAEIIREAEGKRQMWLRTAGLKFEP

SEQ ID NO: 38 - protein, 706 aa, Podospora anserina S mat+
MSPSSNGDSPHSSTATMTAAASATVVGRFPLPNRDFTIEVPSPQLLAQVQINGGGVNSLKSPTSLKSARTPSFSREGILGSAQKARNLSQSSDNRPESNGMQKAPSDEGINPLKRRNTDAGVDYPRRRATIACEVCRSRKSRCDGTKPKCKLCTELGAECIYREPGIKLDAGDKLILERLNRIENLLQMNMVGHPNGMGMSHDSPNMSNGTALSGDNLMGIGSNAANFVSVIPSGGLGTWSATATNNISTMPKVHTNAALHLLQWPMIRDLVSRPYDPQILLQLEMAREPLHSLAKTPCVDLSNTNAYIEAYFDRVNIWYACVNPYTWRSHYRIALSNGFREGPESCIVLLVLALGQASSRGSISRIVPHEDPPGLQYFTAAWSLLPGMMTSNSVLAAQCHLLAAAYLFYLVRPLEAWNLLCTTSTKLQLLLMAPSRVPADQRELIERIYWNSLLFESDLLAELDLPHSGVVAFEENVGLPCGFEGDEQEAVGRDELWYFLAEIALRRLLNRVSQLIYSKDSMASTTSLEPVVAELDFQLTQWYESLPLPLQFPFTRTMLPDPVQTVLRLRFFACRTIIYRPYILAVLDNEQAVLDPSVREACTKCLEASIRQLEHITAHHAGHMPYLWQGALSIVSQTLLVMGATMSPSLSSILWSLVPHRDTIDQIINDVVMEIERYAVLSPSLSLSAEIIKEAEVRRRTYLSG

SEQ ID NO: 39 - protein, 712 aa, Pyrenophora teres f. teres 01
MAGITPSPDVSPVSSATTNGGFPRDAFSLNLSTLPDANSFILKSALTSPHLLDSPNGLFSGGGRLSNPFKKRPRNMSQSSGTDREMSNENTPPASNGIAPTSNGNDGSKAEPRPATKKRPSTDTIDYPRRRATIACEICRSRKSRCDGTRPKCRLCTELNAECIYREPGIKLDAGDKLILEHLSRIEGLLQSGLTSNYSLSSHSPAASNSTSDDFLARSTGHIPHLGMVQPINGIGTWTNHPSNISTMPKTHNTAALNLLSSPMIRELVSRQYDAKILLQLEMTRESVSLGTTRGLDLSNTGVYVQAYFERVNVFYAVVNPYTWSGHYQTALSHGFRDGPESCIVLLVLALGHAASTGSITQQNPDKDPPGLAYFAAAWSLLPTVMTRNNMVAAQCQILAAAYLVYLVRPVEAWNVLSGASMKLQLLLSAPGRVSPAEEELGRRVYWNAVMIESDLLAELDLPHSGIAQFEEGFSLPTGFEDLGTEAVGRDELWYFLAEIALRRLLNRVSSMLYIRTTPYSKGPAATSIAQLDPLVVELDFQLNQWYAGLPPAMQFPLDRVPLQNPVQTVLRLRYFACRTIIFRPYVLLVLQDESLAMDSGVQDNCHKCLEACVRQLEYITAHHAGHIPYLFQGALSIISQTLLIMGATMTPSLSQLLPPPATMDDIINNVVLEMERYAHLAPSLRLSAEIIREAEGKRQMWLRTAGLKFEV

SEQ ID NO: 40 - protein, 675 aa, Pyrenophora triticirepentis Pt1CBFP
MAAITPSPDVSPVSSATTNGGFPRDAFSLNLSTLPDANSFILKSALTSPHLLDSPNDLFSGGGRLSNSFKKRPRNMSQSSGTDREMSNENTPPASNGIAPTSNGNDGSNPEPRPATKKRPKLNAECIYREPGIKLDAGDKLILEHLNRIEGLLQSGFTSNYSLSSHSPAASNSTSEDFLARSAGHIPHLGMVQPINGIGTWTNHPSNISTMPKTHNTAALNLLSSPMIRELVSRQYDAKILLQLEMTRESVSLGTTRGLDLSNTGVYVQAYFERVNVFYAVVNPYTWSDHYQTALSHGFRDGPESCIVLLVLALGHAASTGSITQQNPDKDPPGLAYFAAAWSLLPTVMTRNNMVAAQCQILAAAYLVYLVRPVEAWNVLSGASMKLQLLLSAPGRVSPAEEELGRRVYWNAVMIESDLLAELDLPHSGIAQFEEGFSLPTGFEDLGTEAVGRDELWYFLAEIALRRLLNRVSSMLYIRTTPYSKGPAATSIAQLDPLVVELDFQLNQWYAGLPPAMQFPLDRVPLQNPVQTVLRLRYFACRTIIFRPYVLLVLQDESLAMDSGVQDNCHKCLEACVRQLEYITAHHAGHIPYLFQGALSIISQTLLIMGATMTPSLSQLLPPPATMDDIINNVVLEMERYAHLAPSLRLSAEIIREAEGKRQMWLRTAGLKFEV

SEQ ID NO: 41 - protein, 688 aa, Sclerotinia sclerotiorum 1980
MPYVGAMSVSSQDSPNSTTGSGRHFSMSRDKFDINIPSPQISLVSNGDLTSPTSLKSPGTRRIATFSREGILGSAQKARNLSQSSADRESIINGLQNRQNQNQNHNQNGNHNQNGHSDDGINPLKRRSTDAGIDYPRRRATIACEICRSRKSRCDGTKPKCKLCTELGAECIYREPGIKLDAGDKLILEHLTRIEGLLQSTLIGQTSNLALSTGSPSINGGTTTSGDDLMIAANGGFVSLLPATGLGTWTNPTNISTMPKIHTNAALHLLQWPLIRDLVSRPYDPQILLQLEMAREPLVLSKTPCLDLSNTSAYIEAFFAKVNVWYACVNPYNWNNHYRVALSNGFRDGPESCIVLLVLALGQASCSGSISRAVSSEDPPGLPYFAAAWALLPSLMTRSSVLSAQCTVLASAYLFYLVRPLEAWTLLSSTSTKLQLLLSAPGRIPPNQRELCERVYWNSLLFESDLLAELDLPHSGIVHYEEVVGLPGGFEQEDEDGVGRDELWYFLAEIALRRLLNRVSQLIYSKDSMSSTSSLEPVVAELDFQLSQWYESLPIPLQFPYTRTPLADPVQTVLRLRYFACRTIIFRPYILAVLDNEQAAMDPHAGHMPYLWQGALSIVSQTLLVMGATMSPSLSAIINSLVIHDTIDGIINDVVMEIERYAHLAPSLSLSAEIIREAEMRRRSYLGG

SEQ ID NO: 42 - protein, 710 aa, Sordaria macrospora khell
MSPSSNGDSPASVVGSMTMAAQAVPNAVRQYPLPNRDFTIEIPSPQLAPTVNGVNTIKSPSTLKSARAPNFSREGILGSAQKARNLSQSSENRPDNVNVSNGYQKAPSEESTNPLKRRNTDAGVDYPRRRATIACEVCRSRKSRCDGTKPKCKLCTELGAECIYREPGIKLDAGDKLILERLNRIESLLSINMGLASHTNGLGLSHNSPGMSNGTGLSGDNLMMQNPDAACFVSVIPSGGLGTWSATATNNLSTMPKVHTNAALHLLQWPMIRDLVSRPYDPQILLQLEMAREPLHSLTKTPCVDLSNTTAYIEAYFDRVNVWYACVNPYTWRSHYRIALSNGFREGPESCIVLLVLALGQASLRGSISRIVPHEDPPGLQYFTAAWALLPGMMTSNSVLAAQCHLLAAAYLFYLVRPLEAWNLLCTTSTKLQLLLMTPNRVPVDQRELSERIYWNALLFESDLLAELDLPHSGVVAFEENVGLPCGFEGDEQEAVGRDDLWYFLAEIALRRLLNRVSQLIYSKDSLASTTSLEPIVTELDFQLTQWYESLPLPLQFPFTRAMLPDPVQTVLRLRFFACRTIIYRPYILAVLDNEQAILDPSVREACTKCLEASIRQLEHISAHHAGHMPYLWQGALSIVSQTLLIMGATMSPSLNSILVSLVSHRDVIDQIINDVVMEIERYSVLSPSLSLSAEIIKEAEVRRRTFLSG

SEQ ID NO: 43 - protein, 568 aa, Trichoderma reesei
RPAARGTAFYPRKRANTACQVCRARKTKCDNKKPACSYCVSVGATCIQSPVDLSSFDPASLKILDRIDELERLLRHAVPIPGPEAAAPPSHPDDNMDISLLPQRVDHILQWPVFQNSGSHHHSPASYRAPPDAISTPPSGSASLAGLIDMDSHRIYRLLDNFFLHIHCKNPILDEVLARRMVINAFLDGIDWSPASCLALIICALGCIATPFGPSGETKLGTQTYNDSQIFFQAAQKRIGILLVRSDIVGAQCLFLSGVYLMMVFQPVYAWRFFSQALAACQHFPFLARAQNLNASLDSMEMGRQDTQEQAVYWSAWKSERELRQELDLPDFDILHSGSTLYPPFFPAPPIAPAESPDGPDSETQRARAAWLFYLAEISLRRLTSRLSREALDLRQRYSSDSVLLDMLLDMMPEYEAQIREWSESLPADLSIHTPVEEDGICRSVLRGRMINLLEQIYWPFVMASISAHATRRPVKPAVAEFAKRGLETHMHQVHVNKPGFHHRHHGSMFMIRACTRSALVLLAAAKAGCAMPTDWEDSVYKTVGMLAYWEDEDRDLIHWRSTLEREL

SEQ ID NO: 44 - protein, 517 aa, Verticillium albo-atrum VaMs.102
MASRDSFHIEVPSPSLTAVNGTHPLKSPSSLKNHRTPSFSRDGLISAVQKARNMSQSSDQRINGFSDMNKTPSDEGSNPLKRRNTDAGVDYPRRRATIACEVCRSRKSRCDGTKPKCKLCTELGAECIYREPGIKLDAGDKLILERLNRIESLLQMNMWPLIRDLVSRPYDPQILLQLEMAREPLHSLTKTPCVDLSNTTAYIEAYFDHVNVWYACVNPYTWRSHYRTALSNGFREGAESCIVLLVLALGQASLRGSISRIMPGEDPPGLQYFTAAWALLPGMMTSNNVLAAQCHLLASAYLFYLVRPLEAWNLLCTTSTKLQLLLMSPNRVPPNQRELTERIYWNSLLFESDLLAELDLPHSGVVQFEENVGLPGGFEGEEQEAIGRDDLWPYILAVLDNEQAILDPAVRDSCHKCLEASVRQLEHISAHHAGHMPYLWQGALSIVSQALLVMGATMSPSLGSILLTLCGSREAIDQIINDVVMEVERYSNLAPSLSLAAEIIKEAEVRRRAFLSG

SEQ ID NO: 45 - protein, 695 aa, Penicillium marneffei ATCC 18224
MSKRPHEDSVFSKTANFLERSASTPGNSISINELLSNSEEAEADHSETHARKPRNFIASVACENCRLKKTRCDESRPKCGLCKALNLECVYSERKLSKKDQSIGMIISTLHRIETKLENLPSVISNDIRPITGHVLQAVEAIQASASTTAAGTPSARTSSHKFSLSQNTSPAATNLLEAETQGSVDGKEIISFSQHGVVVWPGIIERLPHDFLSVYEQIGRNYVLDVELERPPLPMWVNSPFGLPNTGNWLEELPFALVKGLCEAFFSLFHPFTPFMDKHFFFSLTLGTVIKHGFSTTIETCLVLNVMALGCLAVRAYEEADFPLPGTMGDHFERPAWFEAVLEDPPGLSFFNEARKRMGFLMEKNNLSSCQYYLLSAMYYTQIIRPLDSGAMLNRAATCLCFMLANRDINYNEWEGDMKSRVFWNTVMYETILVQELDLPPSGLLSLEDNVPIPKFIPFKLSSEITRLPDPDESYYHQCHFLAQIANRIILTRIRHSLYLFSESGNLPRPAVSIELHKQVEEWRKNLPSVIQFSEKNSDTTLNDDRSPSISGTPRTPTSLAVLVADSMLRARYRICKFHIGRPYLYKALRTPNLLTDEDYEQIRSGLRFAMDWPMIRGVFRLMRSCIPIRFAFCSQFFGQLLIFHGIANSDEPRLRATLPPGWERWYDEMVEFLEYCSAYSPAISRDMDLVRLL

SEQ ID NO: 46 - protein, 603 aa, Talaromyces stipitatus ATCC 10500
MSYTRKRAALACIFCRSRKRRCDARKPSCSNCLDLDVECHYDDTPSQRIDTSGGSREILNRLRNIEAILQSQSERITALSNEPQRTPLHVHDAVTPRSQQSVAIVDMHSQTWSSSHLNAPSDYSSLPPLTIPVKHKTSSTYLLNLPAVKSLIGEYPTDLFFRFELRSHLPPQLSLEHSHAASPVNIQREITDELILFFFAYVHPNHPVLDREEFQKHYARFLENGPDHSYESILCMVVLALGAVVSTAPDPEVFKSSPPGMDYMQYAMPTLLSVSAWSFSSSMLAAHALVLASVYFAYIVRPLQSWRLIHSASTMLQINHVGVDSLQKISNGFNEGEHLVRLFWSSFLVECDRLAELELPRSGLEELTDSIYLPNCTNLGLAESAWYLAEISIRRLLNRIHNSLYPGKKQPLSKPPITSLASDDFSMEEIVSIDGICNELRSQLETWYLSIPEGLRPVLENANEEDTAGRQAILRIRYFAARHIIYRPFLLCVVTHGSKRAPRSMVEKAAICIESCRWYIHHTTKVLGRPSQYTWTFALSSLGAIIILTLGSLNRDLQAFVPDIDELQTMAIDNFRPWAFSSLEAVVSILEDIRKKRRLLLQV

SEQ ID NO: 47 - protein, 682 aa, Metarhizium anisopliae ARSEF 23
MNTSPDGLKVNQTLGAGRDKAHNPMSRSRLLFQPPDTAPATPLQLANSDGLLSSLKRKLSDCTVDYPRRRATIAVSKQSLCTSARFVSQMLTPYVDFHCRQCEVCRSRKSRCDGSKPKCKLCAELGAECVYREPGVKLDAGDKLILEQLNRIENLLQINLAANQGSGLHMSQSSSSTSNGTASGGDQALLSNSSNTAPTIPNGGLGTWVSVPTGTNISTMPRCHTNATMHLLQWPLIRDLVSTPYDPQILLQLEMDREPLHTLTKTPCVDLSNTQAYIQAYFDRVNIWYACVNPYTWRSQYRTALSNGFREGPESCIVLLVLALGDASLRGSISRIVPHQEPPGLQYFTAAWSLLPGMITTNNVLAAQCHLLAAAYLFYLVRPLEAWNLLCTASTKLQLLLMAPNRIPQKQRELVERIYWNTLLFESDLLAELDLPHSGVVQFEENVGLPGGFEGEEQGQARIGHDDLWYFLAEIALRRLLNRASQLIYSKDSVSSTTSLEPVVAELDYQLTQWYEGLPPPLQFPFSRTMLHDPIQAVLRLRFYACKTIIYRPYILAVLENEQAVLDPAVRECCHKCLEASVRQLEHVTEHHAGHMPYIWQGTLSMMAQTLLLMGSSMSPSLMGILLTIVPHQKALDDLINEVIMEVQNYASLAPSLRLAVEIIKEAELSNITNEARLLRLA

SEQ ID NO: 48 - protein, 677 aa, Neurospora tetrasperma FGSC 2508
MSPSSNSDSPASVVGSMTMAAQAAPNAVRQYPLPNRDFTIEIPSPQIAPTTNGVNTVKSPSTLKSARAPNFSREGILGSAQKARNLSQSSENRPDNVNVSNGFQKAPSEESTNPLKRRNTDAGVDYPRRRATIACEVCRSRKSRCDGTKPKCKLCTELGAECIYREPGIKLDAGDKLILERLNRIESLLQLNMGLTGHTNGLGLSHNSPGMSNGTGLSGDNLMMQNPDAAGFVSVIPSGGLGTWSATATNSLSTMPKVHTNAALHLLQWPMIRDLVSRPYDPQILLQLEMAREPLHSLTKTPCVDLSNTSAYIEAYFDRVNVWYACVNPYTWRSHYRIALSNGFREGPESCIVLLVLALGQASLRGSISRIVPHEDPPGLQYFTAAWALLPGMMTSNSVLAAQCHLLAAAYLFYLVRPLEAWNLLCTTSTKLQLLLMTPNRVPVDQRELSERIYWNALLFESDLLAELDLPHSGVVAFEENVGLPCGFEGDEQEAVGRDDLWYFLAEIALRRLLNRVSQLIYSKDSLASTTSLEPIVTELDFQLTQWYESLPLPLQFPFTRTMLPDPVQTVLRLRFFACRTIIYRPYILAVLDNEQAILDPSVRDACTKCLEASIRQLEHISAHILVSLVSHRDVIDQIINDVVMEIERYSVLSPSLSLSAEIIKEAEVRRRTFLSG

SEQ ID NO: 49 - protein, 708 aa, Aspergillus niger
MYRSSRHVEKLSTTLDEFRGVLDKLFPGIPAETLVNLPRDKLLELTGKGPSQMQTQAPHPASPATSASVEAHASPASSEDGNLESLQTIPDHTTDDRELKGSELTSTVSDDVNALSLSAKQPSSYLGVSSIHAVLKVIVWLEPSSLSHLSRAPATGVRRESVMDIASPEAQAWQVFGSQPHHGTSTHSPLQVPETQLLDAYFTYFQPFVPMLDEQYFRQTYLSARRKDKQWLALLNIVFALGSIAATPADDMSHQAYYMRSMSHLNLESLGSPHVETIQALGLMGGYYLHYSSQPNLAYSMMGAALRMAAALGLHKEVSDGQYGNGRNRLSSVDHKRRVWWSLFCLDTWGGMTLGRPSMGRLGPAITVKLPHYRETGNVLDLLPLLENVRFCKIATQIQEVLAVAPLTKPHEMAHLDSQLLEWYDNLPYILKDHEPCSESIAITRTVMKWRYYNQRMLLYRPTLLSYAMRRVPYIVLRSEERTAIERCREIAEATIQDVAAKAQFHQMSGWNAVWLIFQAAMVPLLGLFLNDGTVDDPRATAEACQAQVETTMLVLERLEPWSPAAKSTLEAVSRIFEAGKRGPSVIGEAHSINSGSCVTSTEETLGAVPGVSPMQVDFGRAIPHDSGFVDPFEPQFINDSAGQYLWDFLSWSDSNLLQGLADIDNVNNGPLFPQEERNAKYGSSDTAFFGGQLGDSTFFINSGPSFY

SEQ ID NO: 50 - protein, 626 aa, Coccidioides posadasii str. Silveira
MPDDSTESRTCRSPDLVAAVSDDVNALSLSTKRPSTYLGISSVNAVMRVIMWIDPESSQHFSRAPDPQPLPKREKQPLPDNCSWSLQPPPSTAGHLEVNPMELTNAYFAYFHSFAPLLDEHLFRETVLVRKRSDPRWLALQNIVFALGSIAAYTADDTSHESYYLKARHYLSLDTLGNPHLETIQTLALMGGHYLHYMSQPNLAHSLMAVALRMATVLGLHKEFIGNQEAASQNSQRKFSVDLRRRIWWSLFCLDTWGYMTLGRPSMGRWGPGITAKLPHNHGNKELAFYALSLVENTRFCKIATQVGDALAASPIVSYQEMVSLDNQLVEWYDNLPPLLKDHEPSADPVSTTRTVMRWRYQSQRILLHRPVLLSYAMRRIPYVALRTEERYAIERCRMVANETIRDVASTTRLNQMTGWNAVWLLFQATLVPLLGLFIADGTATHAHATSDSCRNQVETAIVALERLENWSPTAKRTLEVVSRILETSQRPRHTSVGSCTSGSDTHTAGMSDQSATASSETSNTAPSIHTMDQTAVLSNAAFPSYQNIAPYIQPSPQQMLDYITWGDNNIWSSVQEDFYTQQPPAVGMFGQGQQYLKPLDHEPPAVGERAGVYDNGLETPNIVRF

SEQ ID NO: 51 - protein, 653 aa, Nectria haematococca mpVI 77-13-4
MFHTFSSQTGDDPLPPGAEPEPPVRKVNSALDKATETLRRQAGVLQLLFPNHRLDELVDKDRADLIQLISPKPTRDHVNEERTLQSPDPLPTTGSSGLSGDIEDVPSSPEDLSIGESGEEERRWHESAQDPATIAASDDINALSLAGDQHRRSYLGITSVSAVLKSLFRLCPTAKDLAVEQSQTWPGVSEDETRPLVLNRTPGSLAAPDSLREQRYLGFYFEHIHAITPLIDEDSFRSTFTTGGGQSPAWLGLCNMVLTLGSIASGSDTAHIHYYHRARSYLDLDSLGSGNLESLQALCLLGGYYLHYRNSPNMAYAILGAAQRLAIALGLHRESPIRADHKDSEAGQRYVARIETRRRTWWSLYCLDTWASMTLGRPTCGRWDTNTMNTLPPTLLGPDDHCAVSLRESSRMCHICNRLQDRFAQSTRIDTHEARALDSELQSWYDSLPAILKDTTDAPPRITVAREFLRNRYYSVRMILSRCFLLYRAHEDIKRHTPNPAESQMIDLCRAVAAEAIDAIALHWVPNRIQVWNSAWYLFQACLVPLLSIAMETSSNSSDSEPETVMAWRTMLNKALEVFVDMKPWMRASDRTPDIVAVLFQAVSQGAEGIIRTPSVTDAGAHVFGWADEQWTEMDWSLFLGDEDISHNLFSFT

SEQ ID NO: 52 - protein, 731 aa, Penicillium chrysogenum Wisconsin 54-1255
MFIAFKAQNEEGLRNPKHKRRSERLSRRGSTPRACTSCRRRKIKCDGEKPCEACRWYKKPELCAYTEPRSSQQSQPEKLSIPSPDYKSTLERLFPDNAPENIAHFPRDKLLELVTAGGTPYSHHQDSSIAAGSLDTHNSTLSGEMPGLESLHTIPGEQLDENQCASASESVGHISDDVNALSLSARHPTSYLGVSSIQAALKVIAWLHPAVNTYFAQSLSKDQCSQPPNALPASRAAPQPDPPPTETQMLDAYFVNFQPFAPLIDEEAFRTTYLLGRRKDNRWLALLNMVLALGNITAAGADNNNHRVYFERSMDHLNLRSLGNPSLEVVQALGLMGGWYCHYTSQPNLAYSLMGASLRMAVTLGLQREPSDIHSMLDPKKSGIQEFKRRVWWSLCCLETWGHETLGRPSMDYFGPSITVNLPSRLDKESYFEVLPLTENVQFVKIALKIQESLAALPTLSHAEMFDLDAQLVRWWNDLPPVLKDYEPCPESLYAVRTVMRWRFYNHRMLLYRPTLLNYAMRRIPFMAIRVEERTAIQKCQEIAAISIQDIFSTTKLNQMVGWNAVWMLFQATMVPLICLSAGVADHDSAASFEACKTQVETAMLTLGRMKPYGHTAGRSLEVISGILESNLRGPMAAPVDANGDSLDPQNPQNPPNPQNFPPPNAFNAGQQISRDRVADWTATSFETLSSQYMWEYLSWDHSNLWPEVFDLNTQNDNVAMSFLNSPGGNR

SEQ ID NO: 53 - protein, 705 aa, Verticillium albo-atrum VaMs.102
MAPSIPIPTQGGMFHTCESSAAAAAAARLLLATWANIFQFRVLLPGSPKPLSRTMTRLLLRLLTTQITTAHASGETKRKDPCGQCLSSRAPKRCFYDKHRQRVIPSRKTLEALSQSLEECRSILKRLYPNQETQALLPLSRQELLSLLERPVLDTSIVTALPSPPLNTSPLSQELESPICSSSEQGLSSLEQMPGQDTEWDEERRGRDPIPIEADDVNALGLSVDRQSSYLGASSIKAALMCMLKVQPSLRTQLTTPLNTAEVAHNFPIRPQQLGPKENQRISWSWKGQTLLDAYFKRINVFIPMLDEAAFRAEYLEGQRCDSPWLALLNMVFAMGSITGMKSDDYNHVNYYNRAMEHLPLDAFGSSHIETVQALALIGGYYLHYINRPNMANAVLGAAIRMASALGLHRGESGPERQGNACELVCQPAVAVAHHRPVCRPLYIARCIMKWRYQNLRMLLHRPVLLSLASNTSSGVMLAHVAEQDIAAIETCRELAKQTIEDIAREWTRNQMSGWNAVWFLYQAAMIPLISVFWQWNSPRVSEWHKQIETILDLLEAMEDWSLSARRSREVVWRMYEASRQPSMRSESQSQSPVLHAMGSNEHGSILMAAEAELRMSPIGLEPEGMGMMGMLDQQGLWDLDGMFWGGASGDSSTDAQSHPHHQQQQPGSVDFGSFSVNEQMMHMDYNMIGTPASAVTMDGGFFVH

SEQ ID NO: 54 - protein, 575 aa, Verticillium albo-atrum VaMs.102
MFHTFGSTDPPASHLSPQVARPISRRVNKSCSECTRRKVKCDGRVPCTSCQYYKTSESCVYRQRTKRQAVSKRAFSTLEQVTEQMQVQQRILNTLFPHNSPEDLVGRSRTELLQLLSTASPSDTSVCNISPEPLRPSPQYFLSGTGGTDVSDGSTQASEAGDTVQERRWDESAQQPAEIGASDDINAISLATDQHRPSYLGVTSMSAVMGALFRLCPAAKARTIEFSKELTKEQHPPHQQASDLISGPNLPALNQLREQRCVEFYFEHIHAITPILNEEEFRRTYIGGTRQDASWLGLLNMILTLGSIASGSNTLHVQYYKQARVFLDLDSLGSGNMESLQALCLLGGYYLHYRNSPNMAYAVLGAAQRVAIALGLHRDSSRRTHDQGADTNQENLLRIETRRRTWWSLFCLDTWASMTLGRPTCGRWDNTTMDTQPPSLLSPDDHCAISLRSSCQFCHICNRIQHRFAQLRRMSAIEALAFDQELRDWLYGTTSFDRHGDGMEAGLVPRKGGPMVCKPDKGFGHIQRHEAVDEGIGSSSPHGGYPLSGCHGDGRESGSPINQSGRGLGVTRLVR

SEQ ID NO: 55 - protein, 781 aa, Aspergillus clavatus NRRL 1
MFHTFEGFENPGASAQTKPRGERQPSVSRRVTTLRACTSCRHRKIKCDGEKPCEACRWYKKADQCHYSDPRPSRRHVEKLSTTLDEYRSILERLFPSTSPEVLVSLSREKLLELSGKGPSQQQAHHPASPATSSSVEAHVSPISEEDGNLESLQTMPEESNDSRNRSSDDITNAISDDVNALSLSARQPSSYLGVSSIHAVPKVIVWLDPGSLSYFSRTPPVAPRRDSVRDYPAGSEDQNWHIQSSQQHPITPPQTQMQVTEVQLLDAYFTWFQPFVPMLDEQVFRETYLSGCRRDDRWLGLLNIVFALGSIAACSSDDMSHALYYQRAKSYLNLDSLGSSHLETIQTLGLAGGYYLHYTSQPNLAYSLMGAALRMAAALGLHKEFSDSPDGSNKEKILAMDMKRRTWWSLFCMDTWGGMTLGRPSMGRLGPTITVKLPNHRESGNVLDILPLLENVRFCKIATQIQEVLAVAPLTKHAEMAHLDSLLLEWYGNLPSILKDHEPCSESIMNTRTVMRWRYYNQRMLLYRPTLLSYAMRRVPNIALRSEERTAIERCREIAEATIQDISSTVRSHQMSGWNAVWLVFQATMVPLLGLFLNDPTASDPRASFQSCQSQVETAMLLLARLQPWSRTAKRTLEAVSRILEASKRGSDMGGAPNGVSGGNLPDRESLVSGMMPGNALAQTDSGRSVGIANDGSMMDPMAAFMDDSAGQQLWDFLSWSDSTIWPGFAEADNANEMSFAQDEKNAKYGSNAPGFFGSPMTDSTYYMNSSVPFYSHAQP

SEQ ID NO: 56 - protein, 715 aa, Aspergillus clavatus NRRL 1
MFHTFEIHRNEQRTARDERRGRRPGLRACKECRRRKIRCTGTHPCEPCLYYKKPELCRYSDPRVPRRTLDDSIDTANQYRSVVEQLFPSAPVQSLVSLSREELLALLRDSILVSDGPTPQLPETPGTDQNSHPSQDDSLENTDGNESNDVSDDVNALSTVTRAPSTYLGISSINAVFQVLKWIDPESLELAAAVEETPSPGPAGGRSPSLTKLTNSVIPQSHSTQSNNDLQLLDAYFDYIHPSMPLVDERDFRQTYLAGTRQDDQWLALLNMVLALGSIALYPGDDPSHIVYCKRVRSYLSLESLGTAHLETVQTLGLMAGHYLHYISQPNLAYVLIGAAVRMATALGLHKENADIDESESRPLRPSVPVELRRRIWWSLYCLDTWGSMTLGRPTLGRSSLAVTTRPPVQTVGINSSCTLILVENIRYCQIATRIQEALAASPLIPYSQLQDFDNELLDWYEQLPALLKSYEPCSDSIYTARTRMQWSLHNLRILLYRPVLLSFALRRVPYVALHTEQRLAIDKCRMLANDAIRDIAQARIHNPTAAWGVIWHLFQATLVPLLSLSVVLTNTAPITDADRELVLSCREQVEITIGTISRIEAWHPTARKSLSLISRILAATKVRFADPPPPIYHPQTQPPNQPQSQSQPHSQAMNPALQVPVMTGMPSIYTENELSLPSQEVWDYISWTGHRAWPDTLASQVPNPDFWSAPGWWQ

SEQ ID NO: 57 - protein, 771 aa, Aspergillus flavus NRRL3357
MFHTFEGFENPNNSAPVRGRGERQPSVGRRVTTLRACTSCRHRKIKCDGEKPCEACRWYKKADQCHYADPRPSRRHVEKLSTTLDEYRGVLEKLFPNIQPENLVSLPREKLLELMGKPSLLQTQPPHPASPATSASVEAHVSPVSNEDGNLESLQTMPEESSDSQNSGYTEISNNFSDDVNALSLSSRQPSSYLGVSSINAVLKVILCLDPGALSYFSHPSTNTDSRDSALGYSPAEAQPWPVQESQQPITPPQPHRPVTEMQLLDAYFTYFQPFVPMLDEEVFREVYHSGCRKDERWLALLNIVLALGSIAACPSDDMSHTIYAQRCKSYLNLESLGSSHIETIQTLGLLGGQYLHYVSQPNLAYSLMGAALRMAAALGLHKEFSDNQEGSCKQNIYSTDLKRRVWWSLFCLDTWGCMTLGRPSMGRFGPTITVKLPQYRERGNVLDIIPLLENVRFCKIATQIQEILAAAPLTRYHEMSHFDNQLLEWYENLPYILKDHEPCSESIIITRTVMKWRYYNQRMLIYRPTLLSYAMRRVPYIALRSEERTAIERCRQIAEATIQDISSTAQSHQMSGWSAVWLIFQAVMVPLLGLFLNDNTTNDPRATVASCQSQVEMAMLVLARLEQWSPTAKRTLGAVSQILEASKRGTNMANEAGLVNSMFAVSREGAVPRAASGFHPSQNIFLQNEAGFDPFAPPVIDDSTAQYLWDFLSWSDSSLWPGITDTNSFNDETLFAQTDKTMKYPNNGAAFMGGSMGDGAYYANPPLPYY

SEQ ID NO: 58 - protein, 777 aa, Aspergillus terreus NIH2624
MFHTFEGFENPAGSTVSRGRNERQQSVGRRVTTLRACTSCRHRKIKCDGEKPCEACRWYKKAELCHYSDPRPSRRHVEKLSTTLDEYRGVLEKLFPNMSPEALFNLPREKLLEMTTTGATAHGQVQGAHPASPATSASVEAHVSPMSNEDTNLESLQTMPDESSEARNSANSEATNGISDDVNGLSLSARQPSSYLGVSSINAVLKVIVWLDPGSVTYFSRTPAMGARRGSIVDLSAPEAQNWPVQAGQQQQPVTPPQQVPVTDVQMLDAYFTYIQPFIPMLDEQSFRETYMSGQRKDDQWLALLNVVFAMGSIAACPSDDTTHQTYYQRAKGYLNLECLGSSHLETIQALGLLGGYYLHYVSQPNLAYSLMGAALRMAAALGLHKEFTEGQDANNKQKVSSMDLKRRIWWSLFCLDTWGGMTLGRPSMGRFGPTITVKLPHHRENGNVLDILPLLENVRFCKIATQIQEVLAVTPLTRYQDITHFDNQLLDWYENLPYILKDHQPCSESITIARTVMKWRYANQRMLLYRPTLLSYALRRVPYIALRSEERTAIERCREIAEEAIQDISSTAQSHQMSGWNAVWLIFQAVMVPLLGLYLNDSTNNDPRATVESCQAQVETAMLVLARLQPWSPTARRTLDAVSRILEASKRGPDPMINDAGNMPNGNPCPTSVPGAAPSILLSQHELPRGMNLDSGFADSMAPAFMDDSAGQHLWDFLSWSDNSLWPGVTELDGTVEDILMMPDDKGAKFGNGPSAFFGNPMGEPTYYANTALPFY

SEQ ID NO: 59 - protein, 732 aa, Aspergillus terreus NIH2624
MFHTFDGSESASRAAPGRQGPGGERGETTGRRVTTARACTSCRHRKIKCDGERPCEACRWYRKADQCHYAHPRTSDSKRVKEVSATLDTYRRVLGTLFPNVNVESLDNLPREKLLEVLAAQSQQSPGSIPQPSSSPTATLASVATHGDSTEDDNLELLQTMPAEPLDRQHTGSTDPDQGLSDDVNGLALCARQPSSYLGISSTQAVLKVIVLLNPGCASYLSRKPTSAGEGTAYGAPSGWLPHAPVAPLQPQHLPLTEMQFLDAYFLIFHAFCPMIDEKSFRETYLAGHRRDKPWLALLNIVLALGSVAATNPNDTTHQIYYQRCEENLGLSALGNPQIEIIQTLGLISGWYCHYLSQPELAQSLMGAALRMATARGLHKEPIKHDQVLDPATAASLDIKRRTWWSLFCMDTWAGMTLGRPSMGRTGLTITVKPPHGRDEETLMDVLPLVENIRFARIATEIQELLAAAPLGKHQAAQMDAQLLEWWENLPAILKDYEPCPERIKTVRNVMRWRYYNQRILLYRPTLLSYAMRRVSYLALRTEERTAIEKCREMAELSIQHIAATAQTNQLGGWNAVWWTFLASMVPLLGLFINDPTATDPRASIRSCQAQVETAMLTFARMHALGHTAKTSLDAVSRIFEASKHVDNLAVHGAALPVLAPAVDSVRRDATALGVMPQPEMNRAMTSHSEAAHLDALIYPFVHDANDQQMWDYLSWGDNSMWPGLVTDIAMA

SEQ ID NO: 60 - protein, 631 aa, Aspergillus terreus NIH2624
MEVARAQVLHGAASYSALNKATETVRRQAAVLQVLFPHVTLDDLVDKDRAELIRLLSQSSSTNADLPAERFVVASSVSDSPENDPSALEESDEADDSEDRHWDESAKDPATLATSDDINAIGLAGDRRRRSYLGICSVGAVLKALFRLCPGAKECIIEDSKLWAPVQPDDTRPALLPQGLAMTPLLDSLRELRYITFYFDNVHAITPFLHEESFRAKFTIRDQQGSSWLGLCNMVLTVGSIASGSDTAHIHYYNQARSYLDLDSLGSGNLETLQALCLLGGYYLHYRNSPNMAYSILGAAQRLAIALGLHREPPTRNEQPNPETRGSYALRLETRRRTWWSLYCLDTWASMTLGRPTCGRWDTATMNTSLPCTLHSEDHFATSLRASVEFCHICNRLQHRFAQFIRISVHEAQALDYDLQRWYDGLHPVLQHTTDAPPRMSVAREFLRNRYYNARLILSRCFLLYMAYEDTKRRHPHSAEQQMAGMCRSIAGETIDAIALHWVPNRTQVWNAAWYLFQACMVPLLSIAMANTSDHAAVDPADVSAWYASLHKALEAFSEMRPWMRASDRAPNIVAVLLRAVSQGPDGSIHTPSVTDGALNLFGMSDEFLIEMDWSELPNDENMFQSLFPLT

SEQ ID NO: 61 - protein, 780 aa, Mycosphaerella graminicola IPO323
MYHTFQAAPSFPASGDGSKGPRPPGSSSSRRISTTNACIECRRRKIRCDGNQPCGQCNWYQHPELCAYSKPAQRVIPSRKLVERLQSQVEQYHSLFARLFPGKELENILTMSREGLVNLAVTLPAAKLSPPSAEARDRHQVKSETVESETADSLEALEQAPEQDSTSGESRKLHAKIQAISDDVNGLSLSIDKASSYTGVSSINAAMKVILKTAPFAWAFISQPSAQTSNPSRATTPPPHVRDPDPYYLPSADVGEKLIESYFKYVHVQMPMVDEEQFRHGYLYGTRRDPAWLSLLNMVFALGSLASSTCDNEEHIAFFQRARKHLIAESFASSSLFVLQAFGLLSGYYLHWLNRPNEAIAIMGGTLRMATALGLHREYGHGKPDKGTGGEISADIRRRTWWTLYVLDSLGSLSTGRPSLGRSGPGITTEVPRIPEQMNNAQYLASLRLLPIIHNISFCKIATKVQDQLAARTLIEFGELFAIDAELEKWREDMPPILRDRDWTSCPEMLKIPRAVMYWRYQNLRILMHRPVLLAAALRKTPFANMKDDERLAVSRCRLVAGQSIYDIDASCPENLIAGWNAVWMVYQAVMVPLVSLEGSAPLPGSDDDVEKWKSEIETAIAFFDRMNQWSVAARKSRDVVQRLYNATSFIDQPSAQLHQKVQNREQSALPSTGLQQQSKTIQPAEVDFSAGRPIPLDPSEYQPQENSARQGWDVTTSSGAAVIPDEFFWNDMMWDTLPQNMPDLPPNLGEGIDVVDWWQNGYDTGPDAQSWSQWPQDGT

SEQ ID NO: 62 - protein, 772 aa, Neosartorya fischeri NRRL 181
MFHTFEGFENPGASTPAKGRERQQSVGRRVTTLRACTSCRHRKIKCDGEKPCEACRWYKKADQCHYSDPRPSRRHVEKLSTTLDEYRSVLEKLFPSTSPEALVSLPREKLLELSGKGPSQAHAQHPASPATSVSVEAHVSPISNEDGNLESLQTMPEDPSDSRNQSTSDITNGISDDVNALSLSAKQPSSYLGVSSIHAVLKVIVWLDPGSLSYFSRTPASAAPQESMHDYSTAAEHQNWHIQSSQPHPVTPPQAHMQATDMQLLDAYFTWFQPFVPMLDEQAFRETYLSGHRRDDRWLGLVNIVFALGSIAACPSDDISHKIYYQRAKSYLSLDSLGSSHLETIQTLGLMGGYYLHYVSEPNLAYSLMGAALRMAAALGLHKEFSYSQDASGKQKISAMDLKRRTWWSLFCMDTWGGMTLGRPSMGRLGPTITVKLPNHRETGNVLDILPLLENIRFCKIATQIQEVLAVAPLTKHAEMSQLDSQLLEWYENLPSILKDHEPCSESISNTRTVMRWRYYNQRMLLYRPTLLSYAMRRVPYIALRAEERTAIEKCREMADTTIQDISSTAQSHQMSGWNATWLIYQATMVPLLGLFLNDATASDPRASVQSCQSQVETAMMVLARMQLSSPTAKRTLEAVSRILEASKRGSDMGGAASGLASGSCAQGRESNMSGMMPGVVSALTEPGRGVAIANDGGMVDPMAPPFMDETTGQQLWDFLSWSDSTILSGFSEIENPNDMKCGGNAPGFYSPMTDSTYYMHPSVPFYSLAQP

SEQ ID NO: 63 - protein, 701 aa, Neosartorya fischeri NRRL 181
MFHTFELRHSNPRTATGEQRRGRRPGLRACKECRRRKIRCTGTHPCEPCLYYKKPELCRYSDPRVPHSGTRDHGSHPDSQYRSVLERLFPSVSLQSLASLTREELLDLLRDSILGSDRPPPQPPERPGEEHSRSSLEAISMGNADTGEVNAVNDKDDVSDDVNALSMATRPPSTYLGISSINAVLKVISWVNPESMARPFTTTPSRNRPRVKTRAPVTPSTESQARDQLIDAYFNFIHPSMPLLDETDFRQTYVSNTRRDEHWLALMNMVLALGSISLYPSDDTTHITYCKRARQHLSLESLGSAHIETVQTLGIMAGHYLHYISQPNLAYVLIGAAVRMATALGLHKETADTDASESRPLQSSSVPVDLRRRIWWSLYCLDTWGCMTLGRPTLGRSSTAVSTKPPANTSTTLILLENIRFCQIATRAQEALAASPLPPYAQLQDLDTELTNWYAQLPPLLKTYEPCPDSVHTARTIMRWSLHNLRILLYRPFLLRYALRRVPAITLHTEERLAIEKCQVLARQAIRDIAETQVKSPPAAWGVIWHGFQASLVPLLMLSILAAEAENDVDIEMVESCREQLEVAMAAIARVEAWQPTARPSLDLIAGIFRASLARLGLMAASGASSDGTSPVAPGRVYPVDLQPRVQVPQTVPMAYTGNELGVSSQDVWDYISWVSPTAWTDVQGQASTMDLWSTPGWWQL

SEQ ID NO: 64 - protein, 704 aa, Aspergillus fumigatus A1163
MFHTFALRHSNPRAATGEERRGRRPGLRACKECRRRKIRCTGTHPCEPCLYYKKPELCRYSDPRVPHIGTRGNGSHADSQYLSVLERLFPSVSLQSLASLTREELLDLLRDSILGSDRPPSQPPEGAEDHSRSSFEAMSTGNADSGDVNAVNDKADVSDDVNALSMATRPPSTYLGISSINAVLKVISWVNPESIARPFTTAPLRNKPRPKAQVSRPPSTDCHAPDQLIDAYFNFIHPFMPLLDETDFRQTYVSNTRRDEQWLALMNMVLALGSISFYPSDDTTHITYCKRARQHLSLESLGSAHIETVQTLGIMAGHYLHYISQPNLAYVLIGAAIRMATALGLHKETADTDASESRPLQSSSVPVDLRRRIWWSLYCLDTWGCMTLGRPTLGRTSMAVSTKPPASTPDTLILVENIRFCQIATRAQEALAASPLPPYAQLHDLDTELADWYAQLPPLLKTYEPCPDSIHTARTIMRWSLHNLRILLYRPFLLRYALRRVPAIMLPSDERPAIEKCQQLARDAIRDIAETQVKSPAAAWGVIWHGFQASLVPLLKLSILAAEADGHDVDMEMVESCREQLEAAMAAIERVEAWQPTARPSLDLIAGIFGASMARLELMAVSTASSDGRTSPVAPERGYPVELQPRVRVQVPQSGPMAYMESELGVVSEDVWDHISWMSPTAWDDGQGQASVMDLWSTPGWWQL

SEQ ID NO: 65 - protein, 737 aa, Aspergillus fumigatus Af293
MFHTFEGFENPGASAPAKGRERQQSVGRRVTTLRACTSCRHRKIKCDDEYRSVLERLFPSTSPEALVSLPREKLLELSGKGPPQPHAQHPASPATSASVEAHVSPISNEDGNLESLQTMPEDPSDSRNQSTSDIANEISDDVNALSLSAKQPSSYLGVSSIHAVLKVIVWLDPGSLSYFSRTPASAAPRESMHDYSTSAEHQNWHIQSSQQRPVTPPKAHMQATDTQLLDAYFTWFQPFVPMLDEQAFRETYLSGHRRDDRWLGLLNIVFALGSIAACPSDDISHKVYYQRSKSYLSLDSLGSSHLETIQTLGLMGGYYLHYVSEPNLAYSLMGAALRMAAALGLHKEFSYNQDASNKQKLSAMDLKRRTWWSLFCMDTWGGMTLGRPSMGRLGPTITVKLPNHREAGNILDILPLLENVRFCKIATQIQEVLAVAPLTKHAEMSQLDNQLLEWYENLPSILKDHEPCSESISNTRTIMRWRYYNQRMLLYRPTLLSYAMRRVPYIALRSEERTAIEKCREVADATIHDISSTAQSHQMSGWNATWLIYQATMVPLLGLFLNDATASDLRASVQSCQSQVETAMMVLARMQLSSPAAKRTLEAVSRILEASKRGSDMGGAASGLASGSCAQGRESNISGMMPGLVSALTEPGRGVAIANDGGMVEPMAPPFMDETTGQQLWDFLSWSDSTILSGFSEFDNPNDIKCDGNAPGLYGSPMTDSTYYMHQSVPFYSLGQP

SEQ ID NO: 66 - protein, 704 aa, Aspergillus fumigatus Af293
MFHTFALRHSNPRAATGEERRGRRPGLRACKECRRRKIRCTGTHPCEPCLYYKKPELCRYSDPRVPHIGTRGNGSHADSQYLSVLERLFPSVSLQSLASLTREELLDLLRDSILGSDRPPSQPPEGAEDHSRSSFEAMSTGNADSGDVNAVNDKADVSDDVNALSMATRPPSTYLGISSINAVLKVISWVNPESIARPFTTAPLRNKPRPKAQVSRPPSTDCHAPDQLIDAYFNFIHPFMPLLDETDFRQTYVSNTRRDEQWLALMNMVLALGSISFYPSDDTTHITYCKRAHQHLSLESLGSAHIETVQTLGIMAGHYLHYISQPNLAYVLIGAAIRMATALGLHKETADTDASESRPLQSSSVPVDLRRRIWWSLYCLDTWGCMTLGRPTLGRTSMAVSTKPPASTPDTLILVENIRFCQIATRAQEALAASPLPPYAQLHDLDTELADWYAQLPPLLKTYEPCPDSIHTARTIMRWSLHNLRILLYRPFLLRYALRRVPAIMLPSDERPAIEKCQQLARDAIRDIAETQVKSPAAAWGVIWHGFQASLVPLLKLSILAAEADGHDVDMEMVESCREQLEAAMAAIERVEAWQPTARPSLDLIAGIFGASMARLELMAVSTASSDGRTSPVAPERGYPVELQPRVRVQVPQSGPMAYMESELGVVSEDVWDHISWMSPTAWDDGQGQASVMDLWSTPGWWQL

SEQ ID NO: 67 - protein, 704 aa, Aspergillus nidulans FGSC A4
MFIAFEATKDANASKDLESGPRNPKSVTGRTSTGRRGVVPRACSSCRRRKVKCNGEKPCEACRWYKRPEECTYPEYERLRNMKSSPSPDYRSTLTRLFPGTAPEQLVNLPREKLLELMTGSASQMQDSPSTTASVTTGVSVMPIERPSLESLHSIPRDELGEIPNVPSASSSGQISDDVNALSLLARPPTSYLGISSVQAALKAIAWNLPGYNFSISPTVPRQQPEEPLSPLSTTLATLQFTETQLVDAYFANFHSFAPLLDEDAFRKTHRAGYRQDARWLALRDTVLALGSIIAAVDVNDRTHCTYFESAMSRLNLGSLGNPSLEVVQTLGLMGGWYCHYTSQPNLAYSLMGASLRMALTLGLHRELCDGRSVHDPAQAAHEEFRRRVWWSLCCLEIWGQETLGRPGMDFFTASITVNTPRLIDKDNYIEIVPLIENVEFVKVASKIQESLATPPALTHTEMCDLDTQLLQWWNNLPPILRDSEPYPESIYSVRTVMRWRLYTQQMLLYRPRLLNQTMRRIPFLAVRADERTAIRRCRELAETVILDIAQTTSMNRMIGWNAVWFIFQATMVPLICLSGIPVDNDLEASADSCKRQVETAILALQRMRPYSPTAGRTFEVISNLFGAILQGTGDPPPDADSDAPMDMAMPERVPVANDYNSEQAPRSRPVDEAAGFFDNLPPEYGYTSFGTPVTRCLDMSIIP

SEQ ID NO: 68 - protein, 741 aa, Glomerella graminicola M1.001
MFHSFDSRRSPSASAAAAPTLPRKVNRSCQECTRRKVKCDGGHPCASCQYYKVADSCEYRQRSRRHAVSRSTLEKTAEKLRDQSRVLQELFPDVSVDDLLGKSRAELLALLPRDSLSGTRPAVPQAGLLPAGVVSTAAPEEDGNEDEDDVPDDPTQLSESGEAANDRRWEESAHQPTTIRASDDINAVSLATDQHHSSYLGVTSVSAVLRAIFRLCPAAKEHTAQRVKTWNDAQNQSQLLPSLSPAGAGAGQNPLRERRCIVFYFDHVHPITPILNEDDFRRTLASGARHDGSWLALLNMVFTLGSVASGSDSLHLHYYKQARAHLDIDFLGSGNMESLQALCLLGGYYLHYRNSPNMAYAVLGAAHRVAIALGLHREPAPRSRIADERPVSDAERDTRVSRAETRRRTWWGLFCLDTWASMTLGRPTCGRWDGSTMDTLLPASLFPDDHVAASLRASCMFCHICDRIQHRFAQHARLSAQEALAFDRELREWHASLPEYLRDPANSPPRLAMAREFMRNRYLSVRLILSRCFLLYLAQSHGLRRGAASVSSIAEPSAEDMMLVDICRSVALEAIDAITLYWMPNRIHVWNSAWYLFQACMVPLLSIAIETRHRHSSCQQERPAVRPIPSLATAGMPPVAPLATWCAGLTKALEVFAEMRPWMRTSDYTPEIVAALYEAVTAEIEEPGAAVGPATRTPSATTDGSMDLFEWCDEQLAELDWGTYLGVGGEDGMHQRMFAFF

SEQ ID NO: 69 - protein, 812 aa, Neurospora crassa; identical to SEQ ID NO: 4

SEQ ID NO: 70 - protein, 803 aa, Sordaria macrospora k-hell
MAPSISIPTQGGMFHTFQGVTPRKPSVDSQDSVKSSGSGAAKRITTPHACAECKRRKIRCDGQQPCGQCLSSRAPKRCFYDKHRQRVIPSRKTLEALSQSLEECRSILKRLYPNQEVHALLPLSRQELLDLLDRPVPDNAGNGLPSPPLNTTSMADLNSPIKSENILEQIPTRDTEWDEERRERDHIPAEADDINALSLSVDRQASYLGASSIKAALMVMLKVQPGLRSSLAAPLNSVEISHNFPAIRQKSSTQKDPQRIPWSWKGQTLIDAYFKRVHVFIPMLDETTFRADYLEGQRFDAPWLALLNMVFAMGSIVAMKSDDYNHVNYYNRAMEHLPMDSFGSSHIETVQALALIGGYYLHYINRPNMANAVLGAAIRMASALGLHRESLTQGGSDMVAAETRRRTWWALFCLDTWATTTMGRPSFGRWGPAINIRPPEFGVNSGRDSSQHAGILPMIENIKFCKIATQIQDMLAISPLLRTEDRCNLDGQLVAWYNNLPWLLRTTDPCAEPLYMARCIMKWRYQNLRMLLHRPVLLSMASSGLNPHTQACDSDLAAIETCRELAAATIEDIGREWTRNQMSGWNAVWFLYQAAMVPLVSIFWQWGNPRVPEWLKQIEAVLEFLEAMEEWSLAARRSREVVLRMYEASRVIQAQGAAAHQLQQRRSQSPHSVNGTGPLGMHINTDLLMGSPDSAELHMSPIGLEPVEGLGMMGMLDQGGMWDLDGMFWGPSPSPPHHGHHPTHPDDAVATAADFAAAFPTADGADGLLHHHSAIEYGNLMGHHHADAHTGQGQFGGVDGYSY

SEQ ID NO: 71 - protein, 822 aa, Podospora anserina S mat+
MEIYKSASAPHVLASLRHYPHLSLSNFGLSNMAPSIPVPTQGGMFHTFQGVTPRKQSTDSQDSTKTSSTGTAKRITTPHACAECKRRKIRCDGQQPCGQCLSSRAPKRCFYDKHRQRVIPSRKTLEALSQSLEECRSILKRLYPTQDVQSLLPLSRQELLSLLDRPTIDTSVGGLPSPPLNTSPMSDLDSPMMPKTENLLEQMPSRDTEWDEERRGRDPIPAEADDINALSLSVDRQTSYLGASSIKAALMVMLKVQPGLRNSLAAPLNGVEMSHNYPAIRQKPTTQKDPQRIPWSWKGQTLIDAYFKRIHAFVPMLDESTFRADYLEGQRTDAPWLALLNMVFAMGSIAAMKSDDYNHINYYNRAMEHLPMDAFGSSHIETVQALALIGGYYLHYINRPNMANAVLGAAIRMASALGLHRESITVGLPGSDIIAAETRRRTWWSLFCLDTWATTTMGRPSFGRWGPAINIRPPEFGINANRDSSQHAGILPLIENIKFCKIATQIQDMLAITPLLRTEDRCAIDAQLVNWYTSLPWLLRTTDPCAEPLYMARCIMKWRYQNLRMLLHRPVLLSLASSGLNPHTQACDADLQAIETCRELAAATIEDVGREWTRNQMSGWNAVWFLYQAAMVPLVSVFWQWGSPRVPEWLKQIEQVLDLLEVMEEWSLAARRSREVVWRMYEASRAVQAQGAAARSQSPAGLHITTTADSIVVGGGEVHMSPIGLEPVDGMGGMMGLLDQGGLWDLDGMYWGGNGPQSPTHTGNPDDSAAAAEFAAYAAAQQAASAAHHHHPELMQHVDYGMMHHHHAGHHHVGMEGFGYVQ

SEQ ID NO: 72 - protein, 797 aa, Chaetomium globosum CBS 148.51
MAPTIPVPTQGGMFHTFQGVTPRKASTDSQDSTKTSGSGTAKRITTPHACAECKRRKIRAPKMCFYDKHRQRVIPSRKTLEALSQSLEECRSILKRLYPNQEVQALLPLSRQELLNLLDRPVIDTSVGGLPSPPINTSPISDIGSPMMTKSENILEQLPSRDTEWDEERRGRDPIPAEADDINALSLSVDRQASYLGASSIKAALMVMLKVQPSLRNTLAAPLSGVEMSHNFPAVRQKSSAAPKDPQRIPWSWKGQTLIDAYFKRIHVFVPMLDESAFRADYLEGQRTDAPWLALLNMVFAMGSIAAMKSDDYNHINYYNRAMEHLPMDAFGSSHIEMVQALALIGGYYLHYINRPNMANAVLGAAIRMASALGLHRESLAQSSSDIIAAETRRRTWWSLFCLDTWATTTMGRPSFGRWGPAINIRPPEFGINANRDSSQHAGILPLIENIKFCKIATQIQDMLAITPLLNTEDRCNLDSQLVAWYTSLPWLLRTTDPCAEPLYMARCIMKWRYQNLRMLLHRPVLLSLASSGLNPHTQACDADLAAIETCRDLAAQTIDDIAREWARNQMSGWNAVWFLYQAAMVPLVSVFWQWGSPRVPEWLKQIEAVLDLLEVMEEWSLAARRSREVVWRMYEAARQLVAQQRASASPSIQVLTGGGAAGAEGMLMASPGSAEAAGMHMSPIGLEPVDGLGLMGLLDQGGLWGDLDGMYWGSQHSHSGSMSLGSPVDESAMAAAAAHEFAAAAAYHPGAPTTAGPHEGMVHAVDYGGLMGHHAHPHHGGHHHHQAAAMEFGYVQ

SEQ ID NO: 73 - protein, 751 aa, Glomerella graminicola M1.001
MAPSIPVSTQGGMFHTFQGVTPQKQTSDSQESGKSAGSNTSKRITTPHACAECKRRKIRCDGQQPCGQCLSSRAPKRCFYDKHRQRVIPSRKTLEALSQSLEECRSILKRLFPNQDIQSLLPLCRQDLLSLLERPVLVTATALPSPPLNNSPLSQELESPVCSGSERGFSSLELMPGRDTEWDEERRARDPIPIEADDVNALSLSVDRQSSYLGASSIKAALMCLMKVQPALRNSLTTPLHSAEVMHNFPSLRQKSAVTKDTQRVPWSWKGQTLIDAYFKRIHVFVPMLDEAAFRADYLEGQRFDGPWLALLNMIFAMGSIVAMKSDDYNHINYYNRAMEYLPIDAFGSSHIEMVQALALIGGYYLHYINRPNMANAVLGAAIRMASALGLHRESLAQGSSDVVAAETRRRTWWSLFCLDTWATTTMGRPSFGRWGPAINIRPPEFGVNQTRDSSQHAGILPLIENIKFCKIATQIQDMLAISPLLRTEDRCNLDGQLVNWYSSLPWLLRTTDPCAEPLYIARCVMKWRYQNLRMLLNRPVLLSLASNGSLSQVGEQDITAIETCREIAKHTIEDIAREWTRNQMSGWNAVWFLYQAAMIPLVSVFWEWNSPRVPDWHQQIETIIDLLEAMEDWSLAAKRSREVVWRMYEASRQPSVRSESPLQGMSSDQGLLLAESELHMSPIGLEPEGMGMMGMLDQHGLWDLDGMYWGQSPDQSVDFTPYTVNEQMMHMDYGMMGSQTATIGGDFFIH

SEQ ID NO: 74 - protein, 781 aa, Magnaporthe oryzae 70-15
MAPATSPAPTQGMFHTFQGVTPRKQTSEAPGSPKAANPVSNSKRITTPHACAECKRRKIRCDGQQPCGQCLSSRAPKRCFYDKHRQRVIPSRKTLEALSQSLEECRSILKRLYPSHDVQSLLPMSRRDLLDLLDRPILDTTAAALPSPPLNTSPLSDEIQPPLFIKPDQVLSSLEQMPSRDAEWDEERRERDAIPAEADDVNALSLTMDRQASYLGASSIKAALMVMLKVQPGLRSTLSAPLNTGEMPHNYPSTKSRAGTHKDPQRIPWSWKGQTLIDAFFKRIHVFIPMLDETTFRADYLEGQRFDAPWLALLNMVFAMGSIVAMKSDDYNHVTYYNRAMEHLPMDAFGSSHIETVQALAIIGGYYLHYTNRPNMANAVLGAGIRMASALGLHRESLTQSAGDVLVAETRRRTWWALFCLDTWATTTIGRPSFGRWGPAINIRVPEFGINAARDSTHHAGILPMIENIKFCKISTQIQDMLAVSPLLRTDDRCHLDAALVDWYANMPWLLRTTDPCAEPLYIARCVMKWRYQNLRMLLHRSVLLSLASSGSTHAAEHDIAAIETCRDLAQQTIEDIAREWTRNQMSGWNAVWFLYQAAMIPLVSVFWQWNSARVPEWHKQIETVLELLDAMEDWSLAARRSREVVFRMYEASRNLQRQQQHHRSQSPADSTTSSHHMGMTGGRTSPRLIIGPSADTAVEMPHMSPIGIVDPESIMGMMGVSDQQSLWDLDGMLWGQHDEFDAGAYGFHDNMMMSMDYNMMGNDIPATTAAALDHGYPYVH

SEQ ID NO: 75 - protein, 829 aa, Verticillium albo-atrum VaMs.102
MYHNFQIEGGPQPASASQLGGLDASDTKTVKVSKACAECKRRKIRCDGQHPCRQCISTRVPKKCFYDKHRPRVVPSRKYVTPLQILLCGSSIVDRGAPQLLTRACRRVLENLSQSLEECRSVINRLFPNQEIFDLLPLTREELLELLRHPTKPHDEAVLPSPPANPSPLEDDEESLDQEVEPGAAELEQMPTKDSEWDEERREHEPIPVESDDVNALSLTMDKRASYLGASSVKAVLMVMLKLKPQLRNALATPRNMAAATGAIAVQPEAMRRASAVESKPAAKVPWTWRGQTFVDAYFKRVHAFIPMLDEASFRADYSLGQRVDSPWLALLHAVLAMGSIAATKSSDLHHEQLYQQAMTHLTIDSFGSSRVETVQALAIIGGFYLHYINRPNMANAILGAAVRMASALGLHRESLAQGLSETDVLAAEIRRRTWWSLFCLDTWATTTMGRPSFGRRGPGINIRSPELGISQAAESAQHAGVLPMIENIKFCRIATQIQDTLAASSLPSTDDRQSMDTQLVTWYESLPWLLGTTQPCAEPLYIARCVMKWRYQNLRMLLHRPVLLTWAASQQRPVPARSHRRASHAPSSVSSSADAGTSPGSGVLNDEEILASINTCSDMAAQTIEDIAKEWTRNQMLGWNAAWFLYQAAMIPLLRLCWQPGNAEVETWRSQIETTLEILDAVGDWSLTACRSREVVRRVYEASCQNEEVQPSLTAAAKLMGANPVAQGDMSNLYGSTGGMGQTAEDFDFRMSPIRLDTDMEVAAFMEQDWMWDLDGMFWGQQPGTNPQQQQQHPQQHASLQMHDTNVLYGDGMTVMPMHYNMDNMNNG

SEQ ID NO: 76 - protein, 647 aa, Nectria haematococca mpVI 77-13-4
HACVECKRRKIRCDGKQPCDRCQSRRSQSRCVYDHHRQRIVPSKRVLDELSQNLQDCRSVLSRLFPGHDVSSLLPLSRQELCQLLDQPSSQSTEPIETLPSPALSMSKIQLLDVQQIPAGDTEWDEERRERDPLPAEADDVNGLSLTLDRQASYLGISSIKAAFGVMVKIQPQLRTSLASLQRNGSKRTLELPSPQTGQLEETAPIPWTWKGQLLIDNYFKGLHVFTPMLDEVSFRADYLGGQRCDAPWLSLLNMVFAMGAIMATKSSDLDHFKFYEKAMKHLSMGAFGSSHIETVQALALLGGYYLHYVNRPNMANAILGATIRMASALGLHREPMAGDNINTALVEMRRRTWWSLFCLDTWTTTTMGRPSFGRCDPSIDIQPPQISIDQERDSAQHAGIMPLLENIQFCKIATQIHDMLAATSQQTAESLQHLDGLLVGWYDKLPSILRNRESCAEPLHLARCVIKWRYLNLRMLLCRPILLAVASSDKDAPISEDDLAAIATCQELARQTIDDVASGWTKHQMSGWNAVWLLYQAAMIPLLSILWQPQSPSVADWQAQIEKTLEVLEAMEDWSLTARCSRDVVKRIYEASRQLSGQNEGVSAVESDRLPEFMEEDFYAWAEGLELDHMVNMLDQEWQWDIGPGQ

SEQ ID NO: 77 - protein, 734 aa, Botryotinia fuckeliana B05.10
MQVLSTEAKKIPLSTYFCHIPYRVDKAALAVINLQVIPDPNPIRNLSRWVGYCPSDIGSHFHAFINWFNKDVSYLTLDALSQSLDECRTVLRRLFPDQEMQQLLPLSRNELVALIDRSPRSALSIASPSASNTSPTSQEYRSPLNSGSDECRSLANLEQIPNQDIEWDEERRNRDPIPTEADDVNALSLSVDRQSSYLGATSIKAALLVMLKVAPRLRSLFLAPSNNRQISASSNYPTPRPGSSAKDLQAISWSSNGQTLIDAYFNRVQIFVPMLDEPTFRADFLSGRRQDAPWLGLLNMVFAMGSIVASKSDDHNHINYYNQAKDHLGIDSFGSGHLETLQALSLMGGLYLHYINRPNTANAICGAALRMACAMGLHRESMHENSTESNLIAEQRRRTWWSLFCLDTWASTTLGRPSMGRWGHAITMQPPESTLNTNQNMNITPLVENIKFCKVATQIQDALAQTPLLRNDDLTNLDRQLVEWYDNLPWILRSTEPCPESIHTARCVMKWRYQNLRMVLYRSVLLNLANRGNQGISPTKEELAAVQTCRKIAQESIEDISREWTPNQMLGWNGVWFMYQASMIPLVSMFWESWNTNLVRIWQSQIEVVLEAFDGMADWSLAAKRSREVVSKVYEVSKRPLTRQPSPGLGHMTDDMNRMGGIDGRNYMDSDMLQQVEIMGEEQLMMLDNGGIWDLDGMLWGNLPDGLDMPYDGLPMQYDDSGMAQFEGPYIFHQ

SEQ ID NO: 78 - protein, 787 aa, Pyrenophora teres f. teres 0-1
MFHTFQSSVSVRSPGGDSDNAARPSRPPGSRRISTSNACVECRRRKIRCDGTQPCGQCQWYQHPEACGYSKPAQRVVPSRKLVDKLSNNLDLYKTILTKLYGTQNLESLATLPREELLELALSSTVANSTTSPSAPDSQTCSEAQAGSDGAESLEALEQAPPEDPYWDEARKHQLRVQGISDDVNGLSMSVDRLSSYVGVSSITAALKVIVRCAPQARSFISNNNQETALPSRASSPPPGLTDDRPDALPPPEHGQQLIESYFDRVHPFFPLIDERKFWSTFLYSNRSDSPWLALLNMVFALGSLSSQAADNEAHHIYFTRSRKHLSLESFGSGNLEVLQALAIMSGYYMHYLNRPNEAHSLMGGTLRMATALGLHREYSERSDASQQAKSVNEEDSISPEMRRRIWWSLFCLDSWASTTTGRPSLGRMGPSITVMRPGTAANAVQTIPPPNSPQYIQQLKILPIIHASAFCQIATKIQDRLVECPLLSSVEMASYDAQLVKWHEDLPSILSKTDEPCPNFLRRTRLVMKWRFQNIRIILHRPMLLTTALRHASWASLSADEKVSVGKCRLVACKTIEDISRDCMPDLISGWNAVWFCFQACMVPLVSLFSDPSVPEEVEKWKASIETALNFFEAVKDWSIAAKKSKDAVARLYAAYKTQASTLSQRTQTPVSHMPYPQQYQQPGHTQIHTHFPVPGTSNGPAMINPQTTNYGQQHQPPFIQYNPATPGWVNTGNDPAILNNFWDDMMWDTNLPDMLETPFGIATDYEYVGAAQDPGPGGACWMHGN

SEQ ID NO: 79 - protein, 976 aa, Leptosphaeria maculans
MQPSRMLQTAATYDAGSTSTRTLDDFVVLVFMPAEAPREEEIACARIVPYVSGTYTILAVLAHDEASHVSLFRGHESPSSKGRSSGDLLERAANMTYADFQCQSRLALRGNSSRPPVSNGRLSLLVHQAYDDTAPALGTRGDFPLTILRPADDMPTTKTLPAALIYQPCIVGIANLTEQEKVWVVDTGDFDTSSCSTSQHDMFHTFQSSAAMRSPDADIDASGKPSRPPGSRRISTSNACVECRRRKIRCDGSQPCGQCQWYQHPEACGYSKPAQRVVPSRKLVDKLSNNIEQYKAVLTKLYGGRNLESLANLPREELLELALSSPSITLTTSPSTTESVALSDVQAGSDGAESLEALEQAPPEDPYWDEARKHQLRVQGISDDVNGLSMSVDRLSSYVGISSITAALKVIVRCAPQARLLIAHNSQETALPSRAGSPPPELADNNPLAVPSAQHGQQLIEAFFDRVHPFFPMIDERKFWNTYLYGDRKDSAWLGLLNTVFALGSLSSSTADNEAHYVYFTRARQHVSLESFGSGNLEVLQTLAIMSGYYMHYLNRPNEAHSLMGGTLRMATALGLHREYSERSGSSRKFTAAGEEDSISPEMRRRIWWSLFCLDSWASTTTGRPSLGRMGPSITVMRPGTAPNAVQTIPPPDSPQYIEQLKILPLIHASAFCQIATRIQDRLVETPLLSLAETAAFDMQILKWHEELPSILSDLNEPCPDFLRRVRTVMKWRFQNIRLVLHRPVLLTTALRRSSWNSLSPEEKVAVGKCRMIAAKTIQELSKECMADLISGWNAVWFCFQACMVPLVSLFSDCSIPEEVKKWNESLETALQFFETAKDWSIAAKRSGDAVTRLYAAYKTYASTMLSQPQAPMQTVQPHYQDSNNFALPGTVTTSSMLNTHQIYSQAQPAFQYNPSTPTWANANDPTILNNLWDDMMWDTNLPDMLETPFGLNNDWEYASTAQDSGSGGACWMHGN

SEQ ID NO: 80 - protein, 777 aa, Aspergillus niger CBS 513.88
MFHTFEGFENPTLPAAVRGRNQRQQSVGRRVTTLRACTSCRHRKIKCDGEKPCEACRWYKKADLCQYSDPRPSRRHVEKLSTTLDEFRGVLDKLFPGIPAETLVNLPRDKLLELTGKGPSQMQTQAPHPASPATSASVEAHASPASSEDGNLESLQTIPDHTTDDRELKGSELTSTVSDDVNALSLSAKQPSSYLGVSSIHAVLKVIVWLEPSSLSHLSRAPATGVRRESVMDIASPEAQAWQVFGSQPHHGTSTHSPLQVPETQLLDAYFTYFQPFVPMLDEQYFRQTYLSARRKDKQWLALLNIVFALGSIAATPADDMSHQAYYMRSMSHLNLESLGSPHVETIQALGLMGGYYLHYSSQPNLAYSMMGAALRMAAALGLHKEVSDGQYGNGRNRLSSVDHKRRVWWSLFCLDTWGGMTLGRPSMGRLGPAITVKLPHYRETGNVLDLLPLLENVRFCKIATQIQEVLAVAPLTKPHEMAHLDSQLLEWYDNLPYILKDHEPCSESIAITRTVMKWRYYNQRMLLYRPTLLSYAMRRVPYIVLRSEERTAIERCREIAEATIQDVAAKAQFHQMSGWNAVWLIFQAAMVPLLGLFLNDGTVDDPRATAEACQAQVETTMLVLERLEPWSPAAKSTLEAVSRIFEAGKRGPSVIGEAHSINSGSCVTSTEETLGAVPGVSPMQVDFGRAIPHDSGFVDPFEPQFINDSAGQYLWDFLSWSDSNLLQGLADIDNVNNGPLFPQEERNAKYGSSDTAFFGGQLGDSTFFINSGPSFY

SEQ ID NO: 81 - protein, 663 aa, Gibberella zeae PH-1
MRGQEEAFIPWIDKYGELLRVCGIHENVGTSEYARPFSTVTPPFISSLSTDLMSPHAHRMRKEVYAHAKIASAERTLEDLSKSLEERDSILARLFPNRDISDLVSLSDQELRDIVLNAGPSPNGTTLTFRSDHTPNESITQDSQWDEDRRERDPLPAEADDVNALSLPLDRQASYLGISSIRAALGAILQMRPQLRASLASRQESYNETSSLRDNGMQCTQMVQSPTENPCVKWSRKGQALVDVYFKRIHIMTPLLDETSFRTTYLSSNRHDSPWLALLNMVLAMGSIAASKSSDREHYKYYTNAMRHLDISAFGSSQIETLQALAIVGGHYLHYINRPNRGNAILGAAFRMASALGFHREPSDQDKEGDQLQVVELRRRIWWCLVCLDTLASMTLGRPSFGRFCPSIDIQPPKFSTGGHGQLDSEPDMDIMLLAENIRFCRIATEIQDKLTVTPFLKPSDRDRFDDMLISWFDSLPSLLGDDQECDELVHLGRSLLDAASKPGVYSQPADQDAIEKCQLLSKTAIEDIAQSWKNDQMSGWNAVWHLYQAVMIPLLSMVWQPQNPAVSEWKSQIEMVLGLFESMRDWSLTARCSKRVVSQIYETIPICCNAERLQLGSFDMERSSHMIRLSHSSQYRDSSFMERVKVLLINLKTAEALKIGSS

SEQ ID NO: 82 - protein, 771 aa, Aspergillus oryzae RIB40
MFHTFEGFENPNNSAPVRGRGERQPSVGRRVTTLRACTSCRHRKIKCDGEKPCEACRWYKKADQCHYADPRPSRRHVEKLSTTLDEYRGVLEKLFPNIQPENLVSLPREKLLELMGKPSLLQTQPPHPASPATSASVEAHVSPVSNEDGNLESLQTMPEESSDSQNSGYTEISNNFSDDVNALSLSSRQPSSYLGVSSINAVLKVILCLDPGALSYFSHPSTNTDSRDSALGYSPAEAQPWPVQESQQPITPPQPHRPVTEMQLLDAYFTYFQPFVPMLDEEVFREVYHSGCRKDERWLALLNIVLALGSIAACPSDDMSHTIYAQRCKSYLNLESLGSSHIETIQTLGLLGGQYLHYVSQPNLAYSLMGAALRMAAALGLHKEFSDNQEGSCKQNIYSTDLKRRVWWSLFCLDTWGCMTLGRPSMGRFGPTITVKLPQYRERGNVLDIIPLLENVRFCKIATQIQEILAAAPLTRYHEMSHFDNQLLEWYENLPYILKDHEPCSESIIITRTVMKWRYYNQRMLIYRPTLLSYAMRRVPYIALRSEERTAIERCRQIAEATIQDISSTAQSHQMSGWSAVWLIFQAVMVPLLGLFLNDNTTSDPRATVASCQSQVEMAMLVLARLEQWSPTAKRTLGAVSQILEASKRGTNMANEAGLVNSMFAVSREGAVPRAASGFHPSQNIFLQNEAGFDPFAPPVIDDSTAQYLWDFLSWSDSSLWPGITDTNSFNDETLFAQTDKTMKYPNNGAAFMGGSMGDGAYYANPPLPYY

SEQ ID NO: 83 - protein, 767 aa, Penicillium chrysogenum Wisconsin 54-1255
MFHTFEGFENPTAATPARNRSTSERRESISRRVTTLRACTSCRHRKIKCDGEKPCEACRWYKKSDQCHYSDPRPSRRHVEKLSTTLEEYRSILGKLFPNFSPESLVNLPREKLLELTIAPSGSHMQTQSHHADSPSTSVSMEAHVSPLSNEDDNLEALQTMPEELPDSRNTSSSDLVEGVSDDVNGLSLSARQPSSYLGVSSIQAVIKVIVWLDPGCASYFSRTPVNEQEDAIGWPHRAPVTPPQPLIPPSEMQMLDAYFLYFQAFAPMIDERSFREAYCAGRRRDDHWLALLNIVLALGCIAATGPDDTTHQTYFLRCKSHLTLTSLGSSHIETIQALGLMGGWYCHYISQPNLAYSVLGAALRMSVALGLHKEFAETRQIPSPAKLASMDLKRRVWWSLFCMDTWAGMTLGRPSMGRIGSNITVKPPLCRDKGNVLEILPLVENIRFAKIATQVQESLAAAPLVKHQEMAHADAQLLEWWDNLPSVLKDHEPCSESINTVRTVMRWRYYNQRILLYRPTLLSYAMRRVPYIALRSEERTAIEKCREVADESIRNIAATAQLNQLCGWNAVWWTFQASLVPLVGLFLNDPTANDPRASIESCQAQVEMAMMTLARMQSFGHTAKRSLDAISRIYEASKRGQDLGDPDSSASVLSSTNPYPAGRDMSVMFPAPEQGRGNVAMGENGFLDPLATTPFADDSGGQYLWEYLSWSDNNLWPGIVTDVDGRNDMMTLLTPDHEKGPKFGEQPAYFDPMPDPGYFANGGFYY

SEQ ID NO: 84 - protein, 737 aa, Aspergillus fumigatus A1163
MFHTFEGFENPGASAPAKGRERQQSVGRRVTTLRACTSCRHRKIKCDDEYRSVLERLFPSTSPEALVSLPREKLLELSGKGPPQPHAQHPASPATSASVEAHVSPISNEDGNLESLQTMPEDPSDSRNQSTSDIANEISDDVNALSLSAKQPSSYLGVSSIHAVLKVIVWLDPGSLSYFSRTPASAAPRESMHDYSTSAEHQNWHIQSSQQRPVTPPKAHMQATDTQLLDAYFTWFQPFVPMLDEQAFRETYLSGHRRDDRWLGLLNIVFALGSIAACPSDDISHKVYYQRSKSYLSLDSLGSSHLETIQTLGLMGGYYLHYVSEPNLAYSLMGAALRMAAALGLHKEFSYNQDASNKQKLSAMDLKRRTWWSLFCMDTWGGMTLGRPSMGRLGPTITVKLPNHREAGNILDILPLLENVRFCKIATQIQEVLAVAPLTKHAEMSQLDNQLLEWYENLPSILKDHEPCSESISNTRTIMRWRYYNQRMLLYRPTLLSYAMRRVPYIALRSEERTAIEKCREVADATIHDISSTAQSHQMSGWNATWLIYQATMVPLLGLFLNDATASDPRASVQSCQSQVETAMMVLARMQLSSPAAKRTLEAVSRILEASKRGSDMGGAASGLASGSCAQGRESNISGMMPGLVSALTEPGRGVAIANDGGMVEPMAPPFMDETTGQQLWDFLSWSDSTILSGFSEFDNPNDIKCDGNAPGLYGSPMTDSTYYMHQSVPFYSLGQP

SEQ ID NO: 85 - protein, 773 aa, Aspergillus nidulans FGSC A4
MFHTFEGFENPAASAPARAGRERQSSIGRRVTTLRACTSCRHRKIKCDGEKPCEACRWYKKADLCHYSDPRPSRRHVEKLSTTLDEYRTVLEKLFPGASPEALANLPREKLLETLAQPQAQPPSTGARQISPATSTSHEAHVSPISTEDGNLESLQAMPEESNDPRNLSSEITNTISDDVNALSLSTRGPSSYLGVSSINAVLKTIVWLDPGSAAYFASTPPSAPRRGSVADLSSSEGQSWAAHDQPGTPPQVHLQVPESQLLDAYFTYVQPLTPILDEQSFRETYAAGHRKDDRWYCLLNIVLAMGSICASTCDDISHKIYYSRCRAYLDLESLASLHLETVQTLGILGGWYLHYVAQPNLAYSLMGAALRMAATMGLHREFADQSDTSNKQKMAQLDLRRRVWWTLFLMDCWGGVTLGRPTMGRFSPAITVKLPHYRESGNVLDILPLLENVRFCKISNQIQDALAVSPLTKYSEILHFDTQLVEWYNSLPYILKDHEPCPEGIANTREVTKWRYHVQRILLYRPTLLSYAMRRVPYIALRSEERTAIERCREIAETAIRDISATAKTPQMSGWNAVWFLFQSTMVPLLGLFINDNTVTDPRATTEACQAQVQDALLVFARLQQASPTARKTLDAVSRIFEASKRGPGIAAETNSINSANLSPTSREAGVLNTPGILPSHNDGRGFAVTHDSSFTDPFAPSTMDDPNGQYLWDFLSWSDTNIVPMADVENINDGGLLGSDDKHFKYTNTSFFGNQLTEPPFFTNSSIPYYS

SEQ ID NO: 86 - protein, 794 aa, Coccidioides posadasii C735 delta SOWgp
MFHIFEGFENPDKARSQSREGRGKSGKRSSTVRACEQCRRRKIRCDGEQPCEACQWYKKTDLCHYSDPRPSRRYPLPVFIRSFSLKSWHVEKLSSTVEEYRVVFEKLFPSIPLQSLSNLPRERLLELASRTQPQSEILPVPVSKPPPSVDNHVLPLPPEDENLESLQTMPDDSTESRTCRSPDLVAAVSDDVNALSLSTKRPSTYLGISSVNAVMRVIMWIDPESSQHFSRAPDPQPLPKREKQPLPDNCSWSLQPPPSTAGHLEVNPMELTNAYFAYFHSFAPLLDEHLFRETVLVRKRSDPRWLALQNIVFALGSIAAYTADDTSHESYYLKARHYLSLDTLGNPHLETIQTLALMGGHYLHYMSQPNLAHSLMAVALRMATVLGLHKEFIGNQEAASQNSQRKFSVDLRRRIWWSLFCLDTWGYMTLGRPSMGRWGPGITAKLPHNHGNKELAFYALSLVENTRFCKIATQVGDALAASPIVSYQEMVSLDNQLVEWYDNLPPLLKDHEPSADPVSTTRTVMRWRYQSQRILLHRPVLLSYAMRRIPYVALRTEERYAIERCRMVANETIRDVASTTRLNQMTGWNAVWLLFQATLVPLLGLFIADGTATHAHATSDSCRNQVETAIVALERLENWSPTAKRTLEVVSRILETSQRPRHTSVGSCTSGSDTHTAGMSDQSATASSETSNTAPSIHTMDQTAVLSNAAFPSYQNIAPYIQPSPQQMLDYITWGDNNIWSSVQEDFYTQQPPAVGMFGQGQQYLKPLDHEPPAVGERAGVYDTGLETPNIVRF

SEQ ID NO: 87 - protein, 757 aa, Coccidioides immitis RS
MFHIFEGFENPDKARSHREGRGKSGKRSSTVRACEQCRRRKIRCDGEQPCEACQWYKKTDLCHYSDPRPSRRHVEKLSSTVEEYRVVFEKLFPSIPLQSLSNLPRERLLELASRTQPQSEILPVPVSKPPPSVDNHVLPLPPEDENLESLQTMPDDSTESRTCRSPDLVAAVSDDVNALSLSTKRPSTYLGISSVNAVMRVIMWIDPESSQHFSRAPDPQPFAKREKQPLPDNCSWSLQPPPSTAGHLEVNPMELTNAYFAYFHSFAPLLDEHLFRETVLVRKRSDPRWLALQNIVFALGSIAAYTADDTSHESYYLKARHYLSLDTLGNPHLETIQTLALMGGHYLHYMSQPNLAHSLMAVALRMATVLGLHKEFIGNQEAASQNSQRKFSVDLRRRIWWSLFCLDTWGYMTLGRPSMGRWGPGITAKLPHNHGNKVGDALAASPIVSYQEMVSLDNQLVEWYDNLPPLLKDHEPSADPVSTTRTVMRWRYQSQRILLHRPVLLSYAMRRIPYVALRTEERYAIERCRMVANETIRDVASTTRLNQMTGWNAVWLLFQATLVPLLGLFIADGTATHAHATSDSCRNQVETAIVALERLENWSPTAKRTLEVVSRILETSQRPRHTSAGSCTSGSDTHTAGMSDQSATASSETSNTAPSIHTMDQTAVLSNAAFPSYQNIAPYIQPSPQQMLDYITWGDNNIWSSVQEDFYTQQPPAVGMFGQGQQYLKPLDHEPPAAGERVGVYDTGLETPNIVRF

SEQ ID NO: 88 - protein, 714 aa, Uncinocarpus reesii 1704
MFHIFEGFENPDKARSQSREGRGKAGKRSSTVRACEQCRRRKIRCDGEQPCEACQWHVEKLSSTVEEYRTVFDKLFPSVPLQSLLNLPREKLLELASNAQSHPESSPVPASASKYSPSAENHVSPLPPDDENLESLQTMPDDTTESQGSSSSDLLATVSDDVNALSLSTKRPSTYLGISSVNAVMRVITWIDPESSQHFSRTSNRQPRSKQEKVAPRDGSGWALPLQAPQRGPFGIFALGSIAAYTANDTSHEGFYLRARHYLSLDTLGNPHLETIQTLALMGGHYLHYISQPNLAHSFMAVALRMAIMLGLHKAFADNHNDASLGNQRKFSIDLRRRIWWSLFCLDTWGYMTLGRPSMGRSGPGITVKLPQYNGTRELALCVLSLVENTRFCKIATQVGDALATSPIVAYSELVGLDDQLVEWFDKLPPVLKDHEPCPDPVLTTRTVMRWRYQSQRILLHRPVLLSYAMRRVPYVALRTEERYAIEKCRMVADETIRDVASTTRLNQMTGWNAVWLLFQATLIPLLGLFIADSTATHPYATLDSCRNQVETAMCALERLESWSPTAKRTLEVVSKILEASQRPRTTVTSSFISGSQASSAAVSLNTPNSSPPVHNMNQVPVLGGTGFQGYQAIAPYMGNTPQQMLDFISWGDNTSIWPSAQEDFYPPPATTVELLGHSEHYLKSLGHSATVTGAREAMYDAGLPPTQNVVRFS

SEQ ID NO: 89 - protein, 749 aa, Talaromyces stipitatus ATCC 10500
MFLTFESSQANKTGLRNPKKQISPTSITTRRSERLNRRRTTPRACTSCRQRKIRCDGEKPCEACRWYKKAELCSYPERERGMGRERNSQEEPAHSSSDYRKALERLFPETAPENIVHLSREKLLGLISKSSAAGSQHHDSMTIATSASVETRHSTLSIERPAGLESLHSIPGEQQKRIHLDDETQCIDGSEEESIEHISDDVNALSLPARNLTSYLGVSSIQAALKVIAWLHPELDSHLSRLSSKDQRRQHHRHQEQPGVLPTEEQMLDAYFTNFQSFAPLIDEDTIRSTFLSNRRKDDKWLALLNIIFALGSITAAGVDNHNHRTYYERSKSYLNINTLGNPSLEVVQTLGLMGGWYCHYISQPNLAYALMGASLRMAVTLGLQREPPLDRNLPVIGTGYQEFKRRVWWSLCCLETWGHETLGRPSMDFFSPSITVNLPRVLDKENYIKILPLIENVHFIRLASKIQDSLAALPTKTYSEMLTLDSQLVAWWNNLPPVLKDCSPCPESIWPVRTVMRWRFYNQRILLYRPSLLNYAMRQIPFVAVRDEERVVVQRCCEIAKMAIEDISGTTTSTIGMNQMIAWNAVWLVFQATMVPLIFLSTCSTAAAATQDDGEVESCKVQVQTAISTLDRMRVYGHTAERSLEMISAILDTVLGISTVRAYNSAGLNENIESQNLPPMTEHQPITRDRVLDWTAAATTSSSFDNFSSQHMWEYLSWGESNDLWPELYTNLDPQDSQIEGADFFNSN

SEQ ID NO: 90 - protein, 642 aa, Pyrenophora tritici-repentis Pt-1C-BFP
MFHTFQSSVNVRSPGGDSDNAAKPSRPPGSRRISTSNACVECRRRKIRCDGTQPCGQCQWYQHPEACGYSKPAQRVVPSRKKQRYQAGQVLRHLDSQMTDQTHYHLPEHGQQLIESYFDRVHPFFPLIDERKFWSTYLYNNRSDSPWLALLNMVFALGSLASQAADNETHHIYFTRSRKHLSLESFGSGNLEVLQALAIMSGYYMHYLNRPNEAHSLMGGTLRMATALGLHREYSERSDASRQTKGVSEEDSISPEMRRRIWWSLFCLDSWASTTTGRPSLGRMGPSITVMRPGTAANAIQTIPPPNSPQYIEQLKILPIIHASAFCQIATKIQDRLVECPLLSSVETASYDAQLVKWHEDLPSMLSKPDEPCPNFLRRTRLVMKWRFQNIRIILHRPILLTTALRHASWASLSADEKVSVGKCRFIACKTIEDISRDCMPDLLSGWNAVWFCFQACMVPLVSLFSDPSVPEEVEKWKASIKTALNFFEAVKDWSIAAKKSKDAVARLYAAYKTQASTLSQQTQTPVPQMPYPQQYQQPCHTQTHTHFPVPGTSNCPAMTNSQTTNYGQQQQPAFIQYNPATPGWVNTGNDPAILNNFWDDMMWDTNLPDMLETPFGIATDYEYVGAAQDPGPGGACWMHGN

SEQ ID NO: 91 - protein, 745 aa, Penicillium marneffei ATCC 18224
MFLTFEASQHNNNDNRTSLRNPKQERLNRRRRSTPRACTSCRQRKIRCDGEKPCEACRWYKKAEQCSYPGRERESHSEEISLPDYRGALKRLFPETAPENLVDLSRERLLALISKPTDGSPYIQHSQHQDSLTIATSTSVETHVSALAMERPGLESLHSIPAEQEQLDENRCASASEESEEHISDDVNALSLPARNLTSYLGVSSIQAALKVIAWLHPELNSHLSHVPKDQRQHHRRSSISAGLPPSDLQLLDAYFDNFQPFSPLLDEETCRSTFLSGRRKDNRWLALLNIILALGSITAAGVDNHNHRTYFERSMSFLNFKILGNPSLEVVQTLGLMGGWYCHYISQPNLGYALMGASLRMAVTLGLQREPPFDSHMSAGVSPARSGYQEFKRRVWWSLCCLETWGHETLGRPSMDFFRPSITVKLPHLLDNENYIKVLPLIENVQFIKIASKIQESLAALPTLTHTELLNLDSQLLQWWNNLPPVLKDYTPCPEALYAARTVMRWRFYNQRMLLYRPRLLNYAMRRIPLIAIKDEERVAVQRCREIAEVAIEDISTTTTAMKMNQMIAWNAVWLVFQATMVPLIYLSVAAVADKQRDDGDDVETCKAQVRRSISTLDRMRPYGHTAKRSSGMISRILEIILRTPDTGVRASVLETHNNAGNTEPQNYPPFLTNHQPIARERVLDWTATTAATTGATNNTSFENYSSQHVWEYLSWGENNDFWAELYTSLNPQEEANFFDARIQ

SEQ ID NO: 92 - protein, 651 aa, Metarhizium anisopliae ARSEF 23
MQTLASSANAPGGMPTFDKTSEQLKLQSKVLETLFPGSNLKDLLEKSQSELLELLSVNHVSPRSKVHQLPPHMPITPGPPPVLPQRREREEDDQFASGSPAQGSASVSENEEAAEERQWDESLDQPATVASDDINAIGLAADNHHARSYLGVTSMSAVFRTIFQLCPAAKEHTNKCARSLAAVPSPVYPTVPVTGRDPALSVLREQRFIDFYFEHIHPLTPLLDEQDFRSQYASGTRRDGSWMGLLNMVFALGSIASGSEGLHEQYYREARSFTGLDSLGSGNLESLQALCLLGGYYLHYRNSPNMAYGILGTAQRVAIALGLHREPRRAMETPDPGEMESCRRRVETRRRTWWSFFCLDTWACMTQGRPTCGRWESSTMDTYFPSCLYPDDQEATLLRANIEFCLIFERAQHRYAQFSRLSNQEILALDAELQTWYKSLPQETKQVDNAPQRFRFARELLKTRYYNARIILARSLILYMAHDLKRKPAELLPEQGHILDHCCSIAAEAIDSTARYWSPNRIHVWHSAWYLFQACTVPLLSIAINRNMEQRQQKQVSSPSSDRVVSWQTSLAKALDTFAEMRPWMRTSDRSPDIVSALYEALTAAGEVDGQTPSATDGSLDLFGWCDDQLTELDWRVFLGDEGLARGMYPV

SEQ ID NO: 93 - protein, 517 aa, Sclerotinia sclerotiorum 1980
MPSSIGSAKMFHTFQGLAPPRQTLSSEQTIQDTPKATTNGVTKRITTPHACAECKRRATSIKAALLVMLKVAPRLRSLLAPSNNKHIPASSNYPTPGPGNSVKELHAVSWSSDGQTLIDAYFNRVQIFVPMLDEPAFRADFLKGRRQDAPWLALLNMVFAMGSIVANKSDDHNHIDYYNQAKDHLGIDSFGSGHLETLQALSLMGGYYLHYINRPNMANAICGAALRMACAMGLHREIATQIQDALAQTPLLRSDDLANLDAQLVEWYENLPWILRSTEPCPESMYTARCVMKWRYQNLRIVLYRPVLLNLANRGNQGIASSKEEIAAIRTCRTIARETIEQISREWSPNQMLGWNGVWFMYQASMIPLVSIFWESWNTNLVRDWQSQIEVVLEAFDGMADWSLAARRSREVVSKMYEASKRPLTRHPSPGLSQISEDMNRMGGIDGRHYMDSEMLQQVEIMGEEQLMMLDNGGIWDLDGMLWGNLPDGLDMPYDGLPMQYDDSAMGQFGTPYIIHQ

SEQ ID NO: 94 - protein, 608 aa, Trichoderma reesei
HACLECQRRKIRCDGKQPCGRCQSSRSRRRCVYEQHRQRLVPSRKSLEELSRNLEECRSVLRRLFPNHQVSHLLSLSRQELCSLLDQPAQQRTVDLSPVPPSPKDDQQHPTELEQMPAQNSQWDEERRDRDPLPAEADDVNALSLAMDKQASSYLGASSVKVALTVMLQIQPQLQLLLASQPSADSSSDDNTRSKVPLIRAASRSAKKQFPIPWTYKGQALVDAYFKRVHVLTPLLDEASFRKHYSEGRRCDAPWLSLLNMVFATSSIMSTPSSNLSHIKYYNQAIEHIHLSAFGSSHIETIHALGLLGGYYLHYINRPNMANAIIGAVLRMATALGLHREPPPEEPQSDPAVVESRRRTWWTLFCLDTWGTTTLGRPSFGRWGPAINIQPPKLVTENVEYDSAQFGGIMPLLENIKFCKIATKIQDMLAVSPLLESEDRHHLDSLLVDWHNNLPWLLRSTEPCVESLHLSRSVMTWRYWNLRMLLYRPVLLTLASKGQLPISEQDVAAVKNCQEAARETVDSVSKGWMRQQMSGWNAVWFLYQAAMIPLVSILWQPDNPAVVDWRAQVESTLELFEAMKDWSLTARRSRDVVSRLLEASSKISNTRQ

SEQ ID NO: 95 - protein, 768 aa, Neurospora crassa OR74A
MDEDRPRKRVRVSIACHNCRNRKSRCDGQHPSCGRCKELDAPCVYDEPPAPHHRPRSSTTDTPPSDILSRLSALEDRINARGTEASRQHATQDDGDDIDAQEDTRESNGSSSNGPLDPPTMTGLPRSHQENVHVDGMGEVQLTDDGENCTYFGPSSNVALVRQLSLALTRAQSQTSRSRAMPTSATSLASSRYSSLQQPRSESGRQDPLNGGVKAGSRPGHHVPPEPEATNIIHEYFSTIGLFFPVIHQDSFMSTYNDLRKKGFMGARRVWLALLYMIIATVYRTNSPSTPSETSAETSERYFQWAKDLVMPQFLISSSLETVQLLCLMIEYLHGSSQSAQLWTLHSLAVKSALQIGLHSADASRHLTLLEREMRKRTWFLIFMNDNNLSAKFGRPMTIPPSLQKRLEPPLDINEHFPTMYASRAVIATSVDAFKCGVQLSHITCQLVSQLYDDNAGGSSLNHVNTFDTLRLAFDFSWKLSQWHQSVPPDLRPQNLTTETPPPVLESSSSSSSPSIEAQRLRAVLGLRYYGLCTLVERPVLLKFLGFQPEPGHGQGDVDTNVALLRESGVVSLRRCIRACRECIALAKAIVDRWQNQKVLLSGAWWLTAYHAFGASLTLYTVLLIAGTKPSFSNLLSDSELTTVRSALSDAVDLLSRFGENSLVISRCHDCLVNFLRAYDLVVVEQQRQQKQQQESQSTTVAATVQTSRNSDHTSSSQSLPPQGQGQGVHVNVIGDGNGVSLTSSSSSSSSSGGYCHEDQLPSSPAVI

SEQ ID NO: 96 - protein, 834 aa, Neurospora tetrasperma FGSC 2508
MAPSISIPTQGGMFHTFQGVTPRKPAVDSRDSVKSNGSGAAKRITTPHACAECKRRKIRCDGQQPCGQCLSSRAPKRCFYDKHRQRVIPSRKTLEALSQSLEECRSILKRLYPHQEVHALLPLSRQELLNLLDRPVPDSTANGLPSPPLNTTPMADSETPTKSENILEQIPTRDTEWDEERRERDHIPVEADDINALSLSVDRQASFLGASSIKAALMVMLKVQPGLRSSLAAPLNSIEISHNFPAIRQKSSTQKDPQRIPWSWKGQTLIDAYFKRVHVFIPMLDETTFRADYLEGQRFDAPWLALLNMVFAMGSIVAMKSDDYNHVNYYNRAMEHLPMDSFGSSHIETVQALALIGGYYLHYINRPNMANAVLGAAIRMASALGLHRESLAQGGSDMVAAETRRRTWWALFCLDTWATTTMGRPSFGRWGPAINIRPPEFGVNAGRDSSQHAGILPMIENVKFCKIATQIQDMLAISPLLRTEDRCNLDGQLVVWYENLPWLLRTTDPCAEPLYMARCIMKWRYQNLRMLLHRPVLLSMASSGLNPHTQACDSDLAAIETCRELAAATIEDIGREWTRNQMSGWNAVWFLYQAAMVPLVSVFWQWGNPRVPEWLKQIEAVLELLEAMEEWSLAARRSREVVLRMYEASRVIQAQGAAAHQLQQRGSQSPHSLNSTTASLGSMHINNDLLMGSPGSAELYMTPIDLEPVEGLGMTGVLDHGGMWDLDGMLWGPSPSPSVHHGHHSTHPDDAVPTVAEYAAAFPTADVVDGFLQHHSAMEFGNMMGHHHHAGAHAGQGQFGVGLVARGYAQLARRRLEGPKYHHIRWLDAATGLT

SEQ ID NO: 97 - protein, 766 aa, Phaeosphaeria nodorum
MFHTFQSSTALRSPGDDTDVSGKPSRPAGSRRISTSNACVECRRRKIRCDGSQPCGQCQWYQHPEACGYSKPAQRVVPSRKLVDKLSTNIEQYKAVLNKLYGSKDLATLANLPREELLEMALSSSSTPGQVTSPNSLEGRATSEIHTGSDGADSLEALEQAPPEDPFWDEARKHQLRVQGISDDVNGLSMSVDRLSSYVGISSVTAALKVIVRCAPHARALITQQTNETTLPSRAGSPPPELTDSSPLALPSSTHGQELLESYFDQVHPMMPLIDERKFWSTYLYGNRKDSQWLCLLNIVFALGSLVSSSTDNEAHYVYFNRCRQHLSLESFGSGNLEVLQALVIMSGLYMHYLNRPNEAHSLMGGALRMATTLGLHREYSERSEAGSHMMLPGFEESLSPEMRRRIWWSIFCLDAWASTTTGRPSLGRMGPSITVLKPGTAADAVSTVPSPNSPQYMEQLKMLPLIHSSVFCSIATRIQDRLVEQPLLSPTETSTYDAQLLKWYDELPSILVKQEPCPDFLRRLRLIMKWRFQNIRVILHRPYLLTAALRGCAWINMSAEEKVAIGKCRVLAMKTIEDMSQECMPDLLSGWNSVWFCFQACMVSLVSLFSDASMPEEVHKWQASIETALQFFDSIRDYSIAAKRSKDAVSKLYQAYKAYAVPATQIPPQISMSQHQYQAQTPYSMAPNPMQLGAHTNLGARNPYQFNPGTPSWSSDPNFLNNFWDDMMWDTNLPDLLEHPFGLSNEFEYGGAAQDSGNNGWLQGN

SEQ ID NO: 98 - DNA, 1914 bp, Aspergillus terreus
atgtccccttcgccagacagggaccgagatactgtccttgatccagccattgtggctgcttctatcgacttcccggatggcaagaaaaaacgctccaattcagaggccaccgagtatccccgacggcgtgcgactatagcgtgccagatatgtcgcttgcgaaagacacggtgcaatggtgcacgtccaagatgccagctctgcacagacttggatgccgattgcgtctaccgagagccgggaatcaagctcgacgcgggagacaagttgatcatcgagaggctgaacagaatcgaaggtttactccaatccagcctagtaggacaacaccctccctttcctcagtcgtctacctctcctgcaaccagtaacgacaccaaccttggcagcgatgacatggtaaacaaatcaagcctgaccagcttgtcaggcagaacttctgtcgctggcatggcgtcatgggctaatcctcctgcaagcatctcaacaatgcccaaggtccataccaccccggcattacaccttctccaatggcctttgatccgagatctagtagcgggcccctacgaccctcacaccctcctgcaacttgaaatggcccgcgagcctctcaggatgaccactgttgctggacttgacttatccaatgcaaatacctatgtgcagtccttttttgaacgcgttaatgtgtggtatgcctgcgtgaatccgtacacgtggtcccaatatcacaagcgagcaatggcccaagggttccaagaaggagcagagagctgcgtggtgctcctggttctagcgctaggctgtgcaagccactatggaaccatctcgtccattcctcccgatagggaagctcctggcctgccatatttcaccgcagcgtggaatcttttgccctctgtgatgatgcgcaattccgtactcgcagcccagtgcatcatcttgtcctctgcctacttattctacctagtgaggccgttggaggcctggacgctactatccaacgccagcatgaagctccagttacttttcggcaacacttcgcgtgttcctgcacagtggaaagagctcagcgtgagagtatactggaatgctcttctctacgaaagtgacctcctagcagaactagaccttcctcactcgggtattgtgcactttgaggagtcggtcgacttaccaggaggatttgaagaagacgacgaggaggaggaagacgaggacccggttgaaaatccccataatggcatgatccacagtgattcagtgggcaatgacgagctttggtactttctggctgagatcgcgcttcgaagattgcttaaccgtgtcagccacatgatataccagaaggacaataccttaacactagcctccctcgggcctatcgtctcggaattggatttccagctctcacaatggtatgacagcctcccgcggcccgttcagttccctctcgcccatacacccttctccaatcccgtccagaccgttctacgactgcgatactatgcttgtcgaacgatcatctaccgaccctatatcctagctgtctttgaaaatgagcagacttccgccgacccgcttgtgaaagagtgctgccgacgatgcctggaagccacactacgccagttggaagatattaccagtcaccgtgaaggacatctcccctacctttggcaaggagccttgtcgatggtgtcacagacattgctcatcatgggggcaacaatgtctcccgctctggcggcattattgcccccgcccatccgagtggatggaattatcgccggcgtcatggcagaggtggatagatatgcccatctcgcgcccagcttgagactttcagccgaaatcattcgagacgcggaacgacggaggcaggtttggatccggtcgtcgggtaagagactttga

SEQ ID NO: 99 - DNA, 2115 bp, Chaetomium globosum
atgtcgccgtcttccaacggcgactcaccgcactcggtcaccgccaccatgacgaccgctgccagcgccaccgtggtaagacagcagtatccgctgccgaatcgggatttcaccgtcgacatcccgtcgccccagcttgccgccggttccaatggcgccggcctgctcaagtcgccaaactcgctcaaggcggcgcgggctgcttctaacttcagtcgggagggcatccttggctcggcccaaaaagcgcggaatttatcacagtcgtcagacaacaggccggacggagtcccgaatggcatcccaaagtccacgagcgaagagagcatcaacccgctgaagaggagaaacacagatgcagcagtagattatccgaggaggagagcgaccattgcctgcgaagtgtgccgctcgaggaagtcgcgatgtgacggcacgaaaccaaagtgcaagctctgcacggagctcggcgctgagtgtatctaccgagaacccggcatcaagctggacgccggcgacaagctcatcctagagcgcctaaacaggatcgagaacctgctccagatgaatatggtgggccacggcaatggcataagcttatctcacgactcgccaaatatgagcaacggcactgctttgagcggggacaatctcatgatgcggaacgcgaacaacgagttcgtctcgatcatccctagcggcggcctgggcacctggtccgcgacggccaccaacatatcaactatgccaaaggtgcacacaaacgcagccctgcacctgctacaatggccgctcatcagagacttggtctcgcggccatacgacccccaaatcctacttcagctcgaaatggcccgcgaaccgctgcactcgctcgcaaagacgccctgcgtggatttgtcaaataccaatgcttacatcgaggcctactttgatcgcgtcaacatctggtacgcctgcgttaacccatatacatggcggagccactaccggatcgcgctatcgaacggtttccgagaagggccagagagttgcatcgtgctcctcgtcttgtcactcggccaggcgagtctgcgcgggagcatatcgaggatcgttccgcacgaggacccccccggcttgcagtatttcacggctgcctggtcattgctccccggtatgatgacctccaacagtgttcttgccgcgcaatgtcacttgctcgccgccgcctacctcttctacctagtgaggccactcgaggcatggaatctgctctgcaccacgagcacgaaactgcagctcctgctcatgacgccaaatcgagtccccgccgaccagagagagctcatcgagagaatctactggaattcgctccttttcgagagcgatctattggccgagctagatctgccccactcgggcgtcgtcgcgttcgaggagaacgtcggcttgccttgcggcttcgagggagacgagcaggaggcggtcgggcgggacgagctgtggtacttcctggccgagatcgcgctgcgtcggctcttgaaccgagtcagccaactcatttattccaaggattcgatggcgtcgacgacaagtctcgaacccgtcgtcgctgaactcgacttccaactgacgcagtggtacgagagcctgcccgtgccactgcaattcccctttacgcgcaccatgctcgcggatccggtacagacggtgttgaggctacgattctttgcttgccggaccatcatctaccggccctacatcctcgcggttctggacaacgagcaggccatattagaccccgcggtgcgggacagttgcaccaagtgcctagaagcctccgtccggcaattggagcacattgccgcgcatcacgccggacacatgccgtacctttggcaaggtgcgctctccatcgtgtcgcaaaccttactcgtcatgggcgccacaatgtcaccgtcgctgtcatccatcctttggagcctcgttccccaccgcgaggctatcgaccagatcatcaacgatgtggtcatggagatcgaacgcttcgccgtcctctctcccagcctcagcctgtcggccgagataatcaaggaggctgaagtccggcgccggaccttcctgagcggttga

SEQ ID NO: 100 - DNA, 1488 bp, Neosartorya fischeri
atgtctgggagaacctccgttgccggacttgggtcctgggtgaacccaccaacgagcatctcgacgatgcccaaggtgcacactactcccgcgctacaccttctacaatggccccttattcgggacctggtcgctcgtccctacgatccgcagacgttactgcagcttgaaatggcccgcgagccgcttagatttccttccgctgcagggttcgacttgtccaatacaacaacgtatgtacagtcttttttcgagcgggtcaatgtctggtacgcctgtgtgaacccatacacttggacacgctattacagtaaagccgtctctctgggattccgagagggacccgagagctgccttgtcctcttggtcttggctctaggcagcgccagtcactacggaagcatctcgttcattccttcagatatggaccccccaggactaccttactttgcaacagcgtggaatcttctgccatcagtaatgatgcgcaactctgttttggctgctcagtgcatcatccttgcgtctgcctacttattctacctagtcagacctctggaggcttggaccctcctctccaatgctagtatgaaattacaattactcttcggggaccccgcccgtgtaccccttcagtggagagaactgagtgtgagagtgtactggaatgctctcttatatgagagcgacttgctggcagagttggatctgcctcactcgggcattgtgcacttcgaagaagttgtcgaccttcccggtggtttcgaggaggaggaggacgaagaagatgatgaagctgacaatgaagatcgtcaaaccagcttagtagagggctcggtaggccgcgaggaactatggtatttccttgctgagatcgctcttcggcgactcttgaatcgcgtcagccatatgatataccagaaagataactcgctgactcttggatcacttgggcccattgtctcggagctggatttccaactttcccagtggtatgagagtctccctcaaccagtccagttccccctcagccacacaccgatttccaaccctgtccagacagtcctccgattgcgatactacgcgtgccggactatcatataccggccatacatcttagctgtctttgagaatgagcacgctgcgactgatcaggtagtaagggaatgctgccggcggtgcttggaggccacgctgcgccagctggagaatattaccagtcaccgcgaaggccatctgccctatctctggcagggcgcgctctctatggtatcgcagacattgttgatcatgggggccacgatgtcccccggactctccactttattgcctccgggattccgagtggatgcgataatatccagtgtgatggccgaggttgagagatacgcacaccttgcgccgagcctcaaattatctgcagagatcattcgcgacgcagagaaacgacggcaaatttgtctcaggtcgaccagtcgacgagtatag

SEQ ID NO: 101 - DNA, 1845 bp, Aspergillus clavatus
atgacgccttccccagagagggacttggtcctcgactcagcctccacagctgccattggagaatttcaagtcagcaagaaaaagcgatctagctcggagctggcagaatatccccgaaggcgtgctactatcgcatgccaaatatgccgcctacgaaagacccgagagccaggaatcaaacttgatgctggcgacaagttgatcattgagaggttgaacagaattgaagggttgctccaatccaacctcttgggacaagcctctcacttcccgttatcctccacatcccctgccaccagcaacgatacgaatgtgggtagtgatgatgcagctgccaaagcatctactatcgcggctatgtctgggagaacttcgattgctggactagcgtcgtgggcgaacccccccacgagcatttcaacgatgcccaaggtacacactactcctgcgctgcacctcttacaatggcctctcattcgggaccttattgccgggccttacgatgctcaggcattgctgcagctcgaaatggctcgtgaaccgctgcgcattcccacttctgtgggattcgacttaacaaactcggccacttatgtgcaggcattcttcgaaaaagtaaatgtctggtatgcctgtgtcaatccctacacgtggacaacttatcataataaggctgtctcccggagtttccaagaggggcccgagagttgcgttgttctgcttgttctggctctaggaagtgccagccactatggaagcatcgcattcattcccccggacatggagccgccggggctaccttatttcgcagcagcatggaatcttctcccgtctgtcatgatgcgcaattctgtgatcgctgctcagtgcgtcgtcctcgcctccgcctatctattttatctggtcagaccactggaggcctggacgcttctatcgaatgcgagtatgaaactacagttactttttggcgaccccgcccgtgttccccttcaatggagagaattgagtgtgagagtgtactggaacgctcttttgtacgagagcgacctgctcgcggaattggacctacctcattctggaattatccactttgaagaactcgttgacctcccgggaggatttgaggaggaagtcgaagaagatgaagatgatatcgaaaacagcgatcgcgaaagcgcccctgtgaacggttccgcaggtcgcgaggaactatggtactttttggcggagattgcgctgaggcgactcttgaacagagtcagtcatctgttatatcagaaggacagttcactgacgctcgggtcgttggggcctattgtgtcggagctggactttcagctttcacagtggtatgacaatctgcctcaaccagttcagtttcccctcaaccatgcaccgatttccaatccggtacaaacggtccttcggctgcgatattacgcatgccggacgattatttaccgaccgtatatacaagcggtctttgagaatgagcaagccgcggcagaccaggtggtaagagaacgctgtcggcggtgtttggaagctacactgcggcagttggagaacattacgagccaccgtgagggacatctcccctatctttggcaaggcgctctctccatggtatcacagaccttactaatcatgggggcaaccatgtcacctggactctccaccttactgccaccgggattcagagtggatgcgatcatctccagcgtaatcactgaggtaggaaggtatgcacatctcgccccaagtctcaagctgtccgcagagattatccgcgacgcggagaaacgacggaagatctgtctcaggtccacgactggacgcgtctag

SEQ ID NO: 102 - DNA, 1812 bp, Aspergillus niger
atgtcttgtcaggaacttgacagtgatactattctcgattcaacctcagcaaaaaagcgcaacaattctgaagcaaccgagtatccccgaaggcgcgcaactatagcgctctgcgtagacctggatgcagattgtgtctatcgtgagccgggcatcaaactagatgccggtgacaaactgattatcgaaaagctgaacagaatagaagtcttacttcagtcgaagtttgcagaccccatcggccagtctcccctgtcatcgaattcttccacggctgccaaccttgtccaaattagtagcgatgatgctgtcagtctcgccaacatacctaccaggacaatcgcggtgggtcttggatcatgggcaaatccaccgacaagcatctcaactatgcccagagtacatacgacaccggctttgcaccttctacaatggcctctcattcgagaactggtcgctgttccttatgatcctcatacacttctacagctagaaatggctcgtgagccacttcggctcgaacctcctgtgagcttagatttatcaaacgcacttactcacgctcgactttttttcgagcgcgtaaatgtttggtacgcttgtgtcaacccattgacgtggcctcgctattacaagatggctctttctcgggacttcgagagagggcctgaaagctgcgttgtactcttggttttggcactgggcagtgccagtcaatatggaagtatatcttgcctttccgcagatgaggaacttccaggactatcatatttctccgcagcttggacccttttgccggctgttatgacgcgcaattcggtgcttgcagcgcaatgtgtcatcttggcatctgcatatttattttacatggtcaggccccttgaggcctggacgctactatcaaatgccagcatgaaattacaattactcttaggtaacccctctcgtgttccggggcaatggaaggagctgagtacaagagtgtactggaacaccttactatttgaaagtgatttgcttgccgaattagacctaccacactcggggattgtgcattttgaagagctcgtcgatctccctgggggctttgaaccggaagatgaagaagatgaagaagacgaaggaagcatacgaattgaagagaaactagtagatgcgatgataggtcaggatgagctctggtatttcttggctgaaattgccctaagaaggctgctcaacagagtcagtcatatgatctaccaaaaagacagcatcttgacactcgcatctctcggtcctatcgcctcagagctagatttccagctgtctcaatggtatgaaagccttcctcagcctgtccggtttcctctatctgggggcccaactttaagccccattcaaacagttttaaggcttcgctactttgcctgccgtacaataatatatcggccttacatcctggcggtcttccagaatgagtatgcatgcagtgacccgacagtaaaagactgctgcctgcggtgcttggacgcgacattgaatcaactcgagcatatagacagacatcgtgaaggtcacctgccgtacctctggcaaggtgccctttccatggtctctcaggcgttgttaatcatgggggcaaccatgtcaccgactctctcatcgctgttgcctccagcgactcagctagacggtatcatatctggcgtcataacggaggttggcagatatgcgcggcttgcaccaagtctaaagttatctgccgagatcattcgtgatgcggaaaagagacgccaggtgtccctcgcgtcagcggccagacgaggttga

SEQ ID NO: 103 - DNA, 1608 bp, Botryotinia fuckeliana
atgtcaatctcatctcaaggaaattctcccaactctacctccggaagcattagacacttctcaatgtctcgggacaaatttgatatcgacatttcctcgccccaactttctatcgtaacaaatagcgatttgacatctccaacctctctaaaatcaccaaacggccgtcgtatcgcgactttttcccgagagggtatcttgggatccgcacagaaagctagaaatttatcacaatcctccgcagatagagaatctatcacaaatgcactacagagcagacaaaatcataatcataatcataatcaaaaccaaaatagaaatgggaatggaaatacaaatggaaatggtaatcagaatgggaacagtgatgatggaatcaatccgttaaaaagaaggagtactgatgctggcattgactaccctagacgaagagctactatagcttgcgagatatgtcgatctcgaaaatcacgatgtgacgccaccaagcccaaatgcaaactaggcacagaattgggggccgaatgtatttatcgtgaaccaggaatcaaactcgatgccggagataaactgatattggagcaccttactcggatcgaaggattacttcaatcaaccttaatcggccaaacatccaatcttgctctctcaaccggatcaccatctatcaatggaggaaccacagccagtggcgaggacctattaatggcagctagcggaggctttgcctctatgatacctgccacaggtcttggcacatgggctatccccactaacatctccacgatgccaaaaattcacacaaacgctgcactacacttactccaatggcctttaattcgcgatttagtatcgcgaccttacgatcctcaaatccttcttcagctcgaaatggccagagagccacttgctttgtccaaagcgccgtgcttagacttatcaaacacctctgcatatatcgaagcattcttcgccaaagtgaatgtctgtacaagtacaaagcttcaacttcttttaagtgcgcccggaaggataccagcaagccaaagagaattatgcgagcgagtgtattggaattcattgttgtttgaaagtgatctgttggccgagttagatttaccacattccgggatagtccaatatgaagaaatagtagggctgccagggggttttgagcaagaagatgaggatggagtaggccgcgatgagctttggtactttttggccgagattgctctacgccggctattgaaccgtgtcagtcaactcatttactcgaaggattcgatggcgtcgacatcaagcttagagcctgttgtggccgagcttgattttcaactgtcacaatgccatgcaggtcacatgccatacctttggcaaggtgcgctcagtattgtctcgcaaacacttctggtaatgggcgccactatgtccccctccctttccgcgatcatcaactcactcgtcatccacgatacaatcgacggtataatcaatgacgtcgtcatggaaatcgaaagatatgcccatttagcacccagtctaagtctctctgccgagataatcagagaagccgaaatgcggagacgcagctaccttggtggctga

SEQ ID NO: 104 - DNA, 2067 bp, Sclerotinia sclerotiorum
atgccttacgtcggcgcaatgtccgtctcatcccaagattcacccaactctaccaccggaagtggtagacatttctcaatgtctcgagacaaattcgacatcaatattccctcacctcaaatttctctcgtatcaaatggtgatttaacatctccaacatcattaaagtcaccgggtactcgtcgcatcgccactttttcccgggaaggtattttgggatccgctcagaaagccaggaatttgtcacaatcttccgcagacagagaatcaatcataaatgggctacaaaacagacaaaaccaaaatcagaaccataatcagaatggaaatcataatcagaatgggcatagcgatgacgggatcaatccattgaagagaagaagcactgatgctggaattgactaccccagacggagagccaccatcgcctgcgagatttgtcgatctcggaaatcacgatgtgacggaaccaagcccaagtgcaaactttgcacagaattaggtgccgaatgtatttatcgtgagccaggtatcaaacttgatgctggggataaactcatattagagcatcttactcgaatcgaaggattacttcaatcgacattaatcgggcaaacatccaatcttgctctttccaccggctcgccgtctatcaatggaggaaccacgaccagtggtgatgatttgatgattgcagccaacggaggctttgtctctctacttcctgccacaggtcttggcacttggaccaatcccacaaatatttccacgatgccaaaaattcacacaaatgctgcattacacctacttcaatggccgttgatccgcgatttagtatcacgaccttacgatcctcaaatccttcttcagctcgaaatggctagagagccgcttgttctgtcaaaaacgccttgtttagatctctccaatacctccgcatatatcgaagcatttttcgcaaaggtaaatgtatggtatgcatgtgttaacccatacaactggaataatcactaccgagttgctttatcaaatggattccgcgatggtccggaaagctgcattgttcttttagtgctggcgctgggtcaagctagttgcagtggaagcatatctagagcggttagttctgaggatcctcctgggcttccatattttgcagccgcttgggcactccttccaagtttgatgacgaggagctcggttttatctgctcagtgtacagttcttgcttctgcgtatttgttttatctcgtgagaccattggaagcgtggacactattgagtagtacgagcacgaagcttcaacttcttttgagtgcgcctggaaggataccaccgaatcaaagggagctatgcgaacgagtgtattggaattcattgttgttcgagagcgaccttttggctgaactagatttaccgcactccggtatcgtccattatgaagaagtggttggactacccggaggctttgagcaggaagatgaggatggagtgggtcgagatgagctctggtactttttggccgaaatcgcacttcgccgactactgaatcgcgtcagccaactaatctactcgaaagattcgatgtcatcgacatctagtttggagcctgtcgtggcggaattggatttccaattgtcacaatggtacgaaagtctacctattcctttacaattcccatatactcgaacacctctagcggatcctgtccagactgtgttgagactgcgatattttgcttgtcgaacgatcatcttcagaccatatattcttgctgtgttggataatgagcaggcagctatggatcctcatgcaggtcacatgccctatctctggcaaggagctctcagcatcgtttctcaaacccttctcgtgatgggcgccaccatgtccccctcactatccgccataatcaactccctcgtcatccacgacacaatcgatggcatcataaacgacgtagtcatggaaatcgaaagatacgcccatctagctcccagtttaagtctttctgccgaaataatcagggaagccgagatgcgaagacgcagctaccttggcggctga

SEQ ID NO: 105 - DNA, 1797 bp, Phaeosphaeria nodorum
atgtctcaatcctcgggcacggatcgtgagatgtcgagtgatcttaccccacctgcacaatcgaacggcacagcaccaacaagcaacggtgccaatggcactcactcagaaccacgcccgtcgacgaaaaagaggccaagcaccgacacgatagactatccgcggcgacgcgcgaccatagcttgcaggctttgcacagagctgaacgcagaatgcatctaccgtgagccaggcatcaaactggatgcaggcgacaagttgattctggagcatcttaaccgcatcgagggcctcttgcaaacaagcatcacgagtggattttccctgtcctcgcattcgccggctgtaagcaacaccacgagcgaggatttcctggcgcgaagctccggcactattccccacttgggcatggtccagcccatcaacggcatcggcacgtggactaaccatccctcgaacatctccacgatgccgaagacgcacaacaccgcggccttgaatctgctcgcctcgccgatgattcgggaattggtgtctcgtcaatacgatgcgaagatccttctccagctagaaatgacgcgggaacctgttagttttagcagctcgcgaggtctcgatctgtcgaacacggggacctatgtccaagcgtactttgaaagagtgaacgttttctatgcatgcgttaatccgtatacatggagcaatcattaccaaaccgcgctggcgcatggatttcgtgacgggcccgaaagctgcattgttctgctggtgttggcccttggacatgctggtagtaccggaagcataacacagcaaaaccccgagaaagagcctccaggcctagcatacttcgctgctgcatggtcgcttctgcctactgtgatgacgaggaacaatatggttgcagcgcagtgtcaaatcttggccgcggcatacttggtctatctagtgcgaccagtagaagcatggaacgtgttatcaggcgccagcatgaaattacaattgctgctgagtgcacctggaagggtatctccagcggaagaggagctgggcaaacgtgtctactggaatgctgtcatgatcgagagtgacctattggccgagctcgatcttccacactcgggtattgcacaattcgaagaaggcttctcattaccaaccggttttgaagacctgggaatggaggtagtgggccgtgacgagctgtggtattttcttgcagagattgcactacgaagattgctcaaccgagtcagctctatgctctacattcggaccacgccgtattcaaagggaccagctgccacatcggtagcacaactagacccactggtcgttgagcttgactatcagctgaaccagtggtatgccggactgccacaggcaatgcagttccccctagacagggtcccgttacaaaatcctgtgcagactgtcttaagactacggtactttgcctgccgcacgattatattccgcccatacgtactccttgtcctacaagacgagaccctggccctcgactccagtgtgcaagacaactgccacaaatgcttggaggcatgccgcatcatgcaggacatctcccttacctgttccaaggtgctctgtccatcgctgtcgcaactgcttccaccaccatctacaatggacgacatcatcaacaacgtcgttctcgagatggaacgatacgcccacctcgcaccaagcctgcgtctttcggccgagataattcgagaggccgagggaaagcgccagatgtggctacgcacagctggactgaagtttgaaccatga

SEQ ID NO: 106 - DNA, 2055 bp, Aspergillus oryzae
atgtctccttctccccaaagagacagagatactcacgttgaagcagtcgccgctgtgactgcttctgacgacttccagtcgagtaagaaaaagcgatccaattctgatgtggtcgaatatccccgaaggcgcgccacaatagctctctgtactgatctagacaccgaatgcgtctatagagagcctggcatcaaactcgatgccggtgataaactgatcattgaaaggcttaatcgtatcgagggactcttgcaatcaagtctagcaagccaggcagcacattgttcattaccctctacgtcaccggcaaccagtaatgataccaacatcggcggtgaagatacaccggttaagacatccagcgtggctgtcatgtctgggaaaacgtcagttgttggactcgcctcttgggctaacccacccacgagtatctcaacgatgccaaaggtacataccactcctgcgttacatctgctacagtggcctttgattcgggggttggtggccggcccctatgaccctcatacactattgcaactggaaatggctcgtgagccccttaggatgaaagcccctaaggagttggacttaacaaatgcaacgatctatatcaggaatttttttcgacgtgtcaatgtttggtacgcctgcgttaatccatatacatggtctcgatattacaaaaccgccgtgtcactcagctttcgtgaaggatctgagagctgcctggtcctcttggtcttggctcttgggtgtgctagtcactatggcagcatttcctctgtctcgccagacaaggaggccccaggcctaccctactttgcggcagcttgggaccttctccctatagttatgatgcgcaactctgtgcctgctgcacagtgtatcatactggcatcagcctatttattctacctagtcagacctctagaggcctggacccttctgtcaaatgccagcttaaaattacagctccttttcggcaatccatctcgtgttcctcttcagtggaaggaactaagtgtgcgaatatactggaacgctctgctctacgaaagcgacttgctagcggaactagatctaccacattcgggaatcgtccactttgaagagctagttgatctacctggggggtttgaggaggaggatgacgaagagtaccaagaggctgaggatgcacatggtgaaattgcatctgaaactgagcctgttggtcacgatgaattatggtacttcctagcagaaattgcattgaggagattgcttaaccgtgtcagtcacatggtttatcaaaaggatagcccattaactcttggaacacttggacctattgtttccgagctggactatcaactctctcagtggtatgagagtctgccccaacctgttcagttccctctctctcgtacacctgtgtcaaactctgtccagactgccctacgacttcgatattttgcatgcaggacaattatctaccgaccttatatgttggctgtttttgaaaatgagcagacatctttagacccagtggtaaaggagtgctgccggcggtgcatagaagccacaatacaccaactggagaatataacaagccaccgcgaaggtcatctaccatatctttggcagggagccttgtccatggtgtcacaaacgctactgatcatgggggctactatgtctccaacgctttctgccttgctgccccctgcagaccaagtagatcggatgatatcagaagtagtggcagaggtcgagagatacgcccaccttgccccgagtttaaagctatcagcagaaatcattcgggatgcagaaaaaagacgtcaaatctgtttgaggtctacagggcgttgcacttaatttacattcatcgtctgctttttcgcctcttcccccaggcccggtgacagtatcgtcccgtgatgtcaactcgaattcacgtgcaggtaaatatacattatatcaaacaagtaagagaataacaacgaaacgaacaacgaaattgttagcgcagatatcgagagaatagcatatatacagctcaatcatggatat

SEQ ID NO: 107 - DNA, 2121 bp, Podospora anserina
atgtcaccatcgtccaacggtgactctccacattcttccacggccactatgactgcggctgccagtgctactgttgtaggaaggtttccattgccgaacagggacttcaccatcgaggtgccctcgccccagcttctggcccaggtccagattaacggcggtggcgtaaactctctcaagtcaccaacatctctcaagtcggctcggactcctagcttcagcagggaaggcatactcggttcggcgcagaaggcgcgcaatctttcacagtcatcagacaacaggccagaatcgaatgggatgcagaaggcaccgagcgatgagggtatcaaccctcttaaaaggcggaataccgatgcgggcgtcgactatccaaggcggagggcaaccatcgcttgcgaggtttgccgttcgaggaagtcacgatgcgatggcacgaagccaaagtgcaagctatgtaccgagttgggtgccgagtgcatttatcgcgagcccggcatcaagctggatgccggcgacaagcttatcctggagcgcttgaaccgcatcgagaacctgctccagatgaacatggtgggccaccccaatggcatgggcatgtctcatgattcgccaaatatgagcaatgggacagctctcagcggtgacaacttgatgggaatcgggtccaatgccgccaactttgtgtccgtcattcccagcggtggacttgggacatggtccgccacagccactaacaatatttcgaccatgccaaaggtgcacacgaatgcggctctgcatctgctgcagtggcccatgatccgcgatttggtatcacgaccgtacgaccctcaaattctcctgcagcttgagatggcccgtgagccgctgcactctctcgccaagactccctgcgtcgacctttccaatacgaatgcctacatcgaagcctactttgacagagtcaacatctggtacgcctgcgtcaacccatacacgtggaggagccactacaggatagcgctatcaaacggtttcagagaaggaccagagagttgcattgtgctgttggtgctggccctgggccaggctagctcgagaggcagcatctcgaggattgtaccccacgaggaccctcccggacttcagtatttcaccgcagcttggtctctgctgccaggcatgatgacgtccaacagtgtgctcgcagcacagtgtcacttgctggctgctgcttatctgttttaccttgttcgaccgctggaggcatggaacttgctttgcacgacaagtacgaaactgcagcttttgctcatggcgccgagtagagtgcccgctgatcagagggagctgatcgaaagaatttactggaactcacttctcttcgaaagcgatttattggccgaattggacctcccccattctggtgtggttgcatttgaggagaatgttggtcttccctgcgggttcgagggcgatgagcaggaagcagttggacgcgacgagttgtggtatttcctggccgagattgcactgaggaggctgctcaaccgcgtcagtcagctcatctactcgaaggattccatggcatcaacaacaagcttggagccggtcgtggcagagcttgacttccagctgacacagtggtatgagagcttgccgctaccgctgcagtttcccttcacacggacgatgcttcccgatccggtgcagacggtgctgagattacgcttcttcgcctgccgaaccatcatctatcggccttatattctggcggtccttgacaacgagcaagcggtgttggacccctcggtgcgggaggcttgcacaaagtgcctagaagcgtcaatccggcaactggagcacattactgcgcatcacgccggacatatgccgtacctttggcagggtgctctgtccatagtatcacagacacttttggtcatgggcgccaccatgtcgccgtcactgtcgagcatcctctggagcctggttccccaccgcgataccattgatcaaatcatcaacgacgtcgtcatggagatcgaacgctacgctgtcctgtcgccaagtctgagcctctcggctgaaatcatcaaggaagccgaagtcagacgtcggacctacctcagcgggtga

SEQ ID NO: 108 - DNA, 2028 bp, Pyrenophora tritici-repentis
atggcagctatcactccttctccagacgttagtcccgtatcgtcagcaacgaccaatggaggtttccccagggatgccttctccctcaatctctccactttgcccgacgccaacagctttatcctcaagtctgccctgacctctccccatcttctcgactccccaaatgatctgttttcaggaggcggccgtttgagtaattccttcaagaagcggccccgcaatatgtctcaatcatccggtaccgatcgggaaatgtcaaatgagaacactccacccgcctcaaacggtattgcgcccacaagcaatgggaacgacggctccaacccagagccccgaccagctacaaagaagcgccccaaactgaatgccgaatgcatataccgtgagccaggtatcaagcttgacgctggcgacaagctgatcctggaacacctgaaccgcattgaaggtcttctacagtctggcttcaccagtaactattcattgtcttcgcattccccagctgcaagcaactcaacgagcgaagattttctcgctcgcagtgccggccatataccccatctcggtatggttcagccgatcaacggcataggaacatggaccaaccacccctcaaatatctccaccatgccaaaaacacacaacacggcagccttgaatctgctatcctcacccatgatccgggaactggtgtctcgtcaatatgatgccaagatactccttcagctagagatgacccgtgaatcagtaagcctcggtacaactcgcggtctagacttgtccaacactggcgtgtacgttcaagcatactttgagagagtaaatgtcttctacgcagtcgtcaacccatatacatggagtgatcactaccagactgcactcagccacggatttcgagatgggcctgaaagttgcattgttctcctagtacttgcgcttggtcatgctgcaagcaccgggagtataacacaacagaacccggacaaggatccccccggcttggcatacttcgccgcagcttggagtctgctaccaaccgtcatgacaaggaataacatggtcgccgcgcagtgtcagattcttgctgcagcatacctggtgtaccttgtacgtcctgttgaagcctggaatgtgttgtcgggtgcgagtatgaagctacaacttcttctgagcgcacctggccgagtgtcgccagctgaagaagaacttggcagaagagtgtattggaatgcggtcatgatcgagagcgatcttctagcggagctagatcttcctcattcaggcattgcgcagtttgaagagggcttttctttgccgaccggctttgaagatttagggaccgaagcagttggtcgggacgagttatggtacttccttgccgagatcgcccttcgaaggttgctcaatcgggtgagttcgatgctctacatccggaccacaccgtattcgaaaggcccggctgccacctccattgctcaactagacccgctcgtcgtggaactagatttccaattgaatcagtggtatgccggactaccaccagccatgcagttcccgcttgatagggtaccgttgcagaaccccgtgcaaacagttctcagactacgctactttgcatgccgcacaatcatctttcgaccatacgtactgctcgtgctgcaggatgaaagcctggcaatggattccggtgtgcaggacaattgccacaagtgtctggaagcatgtgttcgccaactagagtacattactgcgcaccacgccggacatatcccctatctgttccagggtgcgctctctatcatctcccagaccctgctcatcatgggtgcaaccatgactccttcactctcccagctacttcctccaccagcaacaatggacgacatcataaacaatgtggtccttgaaatggagcgctacgcacatctcgcgcctagccttcgtctctccgctgagatcattcgtgaggccgaaggaaagcgacaaatgtggttacggacagcaggcctcaaattcgaagtatga

SEQ ID NO: 109 - DNA, 2473 bp, Penicillium marneffeif
ccgcaacaagagaggagaagaaaagagatgcgggcggccgttgcgcgcccagcaatgcgacaatgagcaagcgtcctcacgaagattccgtcttctcaaagaccgccaacttcctggaacgatccgcttcgacgccaggaaatagtatatctatcaacgagctgttgtccaactcagaggaggcagaggcagatcattccgagactcatgctcgcaagccaagaaattttatcgcatccgtggcgtgcgaaaactgtcgtcttaaaaagacaagatgcgatgaatcacggccaaaatgcgggctatgcaaagccctaaacctggaatgcgtctacagtgaacgtaaactgtccaaaaaggaccagtccattggaatgatcataagcacattacatcgcattgagacgaagctagagaatcttccgtccgtgatttccaatgatattcgacctatcacaggtcatgtcttgcaggcagtggaggctattcaagcatctgcatcaaccacagcggctgggactccaagtgcgaggacgtcgtcgcataagttttcgttgtcacagaatacctcgccggctgcgaccaatctgcttgaggcggaaacacagggatcagtggacggtaaagaaatcatctcattcagccagcatggagtcgtggtttggccgggaatcatcgaacgtctaccgcatgatttcctaagtgtctacgagcaaatcggaaggaactatgttctcgacgtcgagctagagaggccacctcttcccatgtgggtgaattcgccatttgggttaccgaacactggcaattggctagaagagttgcccttcgcgcttgtaaaagggttatgcgaggcgttcttttcgttgtttcacccatttactccattcatggacaaacacttcttcttctcacttacgctcggcactgtcatcaaacatggcttttccacgacgatcgagacatgtttggtgttgaatgtgatggcgttgggctgtttagccgtgcgcgcgtacgaagaagcggatttcccactaccgggcacgatgggcgatcattttgagcgacctgcttggtttgaagcagtgctggaagatccacctggattgtcgttcttcaacgaggctcggaaacggatgggctttctcatggagaagaacaacttgtctagttgccagtactatcttttatcagcaatgtactatacgcagattattcgaccacttgattctggtgcaatgcttaatagagccgctacttgcttgtgtttcatgttagcgaaccgcgatataaattacaatgaatgggaaggtgacatgaagtccagggtattctggaacacagtcatgtacgagacgatcctcgtgcaggagctagatcttccgcccagtggtctgttgtctcttgaagacaacgtccccattccgaaattcattccatttaaactatcctcagagatcacgcgattgccggatccagatgagtcgtactaccatcaatgtcattttctggcacaaatcgcaaaccggatcattcttactcgaatccgacatagtctatacttattctccgaatccggaaacctccctcgcccagccgtcagcatagaactccacaaacaagtcgaagaatggcgcaaaaaccttccctcagtaatccaattctccgagaaaaactcagacactactctaaatgatgaccgctccccttccattagcggcacaccacgaaccccgacttcactggcagtgttagtcgctgactcgatgcttcgagcccgctatcgaatctgcaagtttcacattggccgaccatacctatacaaagcgctgagaacaccaaatctcctgacggatgaggattatgaacagatccgaagcggactccggttcgctatggattggcctatgattagaggcgtttttaggctgatgagaagttgcattcctatcagattcgctttttgttcgcaattcttcggccagctactcatcttccacggcatagcaaactcagatgagccacgattgcgtgcgactttgccccctggttgggaaaggtggtacgacgagatggtggagtttctagaatattgttccgcgtacagtcctgctattagtcgggatatggatcttgttcggcttttataggcccccttgaaagatttgaatgccgtttggttttaggagtgtatagatatgatgttgttatgttggagtgcgacttcttatgtggtctgtcaacttgccgtttttttcttcttctaataccgaagacctctcaatcaatacataacatgcatcctgcctttccttgatgatggaaagaaatgtttctattcggtgtacgattataaagttgctctaccaaagcactccccattgatgtacagtagaacctgcctataacgaacagaaggcaccctcatcactatatcggtatcagattagatgttatacatattattgaatat

SEQ ID NO: 110 - DNA, 1488 bp, Aspergillus flavus
atgtctgggaaaacgtcagttgttggactcgcctcttgggctaacccacccacgagtatctcaacgatgccaaaggtacataccactcctgcgttacatctgctacagtggcctttgattcgggggttggtggccggcccctatgaccctcatacactattgcaactggaaatggctcgtgagccccttaggatgaaagcccctaaggagttggacttaacaaatgcaacgatctatatcaggaatttttttcgacgtgtcaatgtttggtacgcctgcgttaatccatatacatggtctcgatattacaaaaccgccgtgtcactcagctttcgtgaaggatctgagagctgcctggtcctcttggtcttggctcttgggtgtgctagtcactatggcagcatttcctctgtctcgccagacaaggaggccccaggcctaccctactttgcggcagcttgggaccttctccctatagttatgatgcgcaactctgtgcctgctgcacagtgtatcatactggcatcagcctatttattctacctagtcagacctctagaggcctggacccttctgtcaaatgccagcttaaaattacagctccttttcggcaatccatctcgtgttcctcttcagtggaaggaactaagtgtgcgaatatactggaacgctctgctctacgaaagcgacttgctagcggaactagatctaccacattcgggaatcgtccactttgaagagctagttgatctacctggggggtttgaggaggaggatgacgaagagtaccaagaggctgaggatgcacatggtgaaattgcatctgaaactgagcctgttggtcacgatgaattatggtacttcctagcagaaattgcattgaggagattgcttaaccgtgtcagtcacatggtttatcaaaaggatagcccattaactcttggaacacttggacctattgtttccgagctggactatcaactctctcagtggtatgagagtctgccccaacctgttcagttccctctctctcgtacacctgtgtcaaactctgtccagactgccctacgacttcgatattttgcatgcaggacaattatctaccgaccttatatgttggctgtttttgaaaatgagcagacatctttagacccagtggtaaaggagtgctgccggcggtgcatagaagccacaatacaccaactggagaatataacaagccaccgcgaaggtcatctaccatatctttggcagggagccttgtccatggtgtcacaaacgctactgatcatgggggctactatgtctccaacgctttctgccttgctgccccctgcagaccaagtagatcggatgatatcagaagtagtggcagaggtcgagagatacgcccaccttgccccgagtttaaagctatcagcagaaatcattcgggatgcagaaaaaagacgtcaaatctgtttgaggtctacagggcgttgcacttaa

SEQ ID NO: 111 - DNA, 2030 bp, Talaromyces stipitatus
acagtagaacctggctataacgaaaggaaggtcgcttcatatttctactaatcttagcttggattaatttaatatgggattgaagagcatcctactcacgaatattagaatagatattgaaggaccaggttctactgcattttatcctcgaccaaagaatgagctatacgcgtaaacgggcggcattagcttgcatattctgtcgcagcagaaaacggagatgtgacgcacggaaaccatcgtgctctaattgtcttgatttggacgttgagtgtcactacgatgacactccatcgcaaaggattgatacttctggaggcagtcgggagattctcaatcggttgcgaaatatcgaggcaatcctccagagtcaatcagagcggataacagctctttctaatgagcctcaaagaacacccttgcatgttcatgatgccgtcacaccgcggagtcagcagtcagttgcaatcgttgacatgcattcccaaacgtggtcatcgtcacaccttaatgccccgtctgactactcaagcttgccgcctctcaccataccagtcaaacacaagacttcatctacatatttattaaatttgcctgcggtcaaatcactgatcggggaatacccgacagatctcttcttcagatttgaattgcgaagtcatcttcctcctcagctctcactggaacattcccatgcagcgtctcccgtcaatatacagagggaaatcacagacgaattgatattattcttcttcgcatacgttcatccaaaccatccggttctagaccgcgaagagtttcaaaagcactatgctcgattcctcgagaatgggcctgatcatagctatgaatctattctctgtatggttgttctggcattaggagccgttgtttccacagccccggaccctgaggtattcaagtcgtcacctccgggtatggattacatgcagtacgctatgccgacgctgctctctgtttctgcatggtctttttcttcaagtatgttggcggctcatgcactggttcttgccagtgtctattttgcctacattgttcggccactacagagttggcggttgattcactctgcttcaacgatgttgcaaattaatcatgtcggggtggattctcttcagaaaatatcgaatggttttaatgaaggagagcatcttgtccgccttttctggtcatcatttctcgtcgagtgcgaccgtctcgcggagcttgagctcccacgaagcgggctcgaagagttaacagacagcatatatcttccaaactgtacaaaccttgggcttgcagaatctgcctggtatctcgctgagatatccatccggcggttgctcaatcgcattcataactccttatacccaggcaagaaacagccactttcgaagcctccaatcacatctcttgcatctgatgacttttcaatggaagaaatagtttcgattgatggtatttgtaatgaactacgctcacagctggagacatggtatttatctatccccgaaggtctccgtcctgttctagaaaatgctaatgaggaggataccgccggtcgacaagcaattctgaggattcgctattttgcagccaggcatatcatctacaggccatttctactttgcgttgttacgcacggctcgaaacgtgccccgcggtcaatggttgaaaaggctgctatttgcattgagagttgccgatggtacattcaccatactaccaaggtgttgggaaggccaagtcagtacacgtggacattcgcattatcctcccttggtgcgattataattctcactttaggctccttgaatcgagatttgcaagcctttgtgccagacattgacgagctacagactatggcaattgacaactttcgaccgtgggcattctcaagcctggaagcggtcgtatcaatactagaggatatcaggaaaaagaggaggcttcttttacaagtgtgaacttgattatataatatttaaggaagtagttaagttactttaaattcgtgtcatctacaa

SEQ ID NO: 112 - DNA, 4928 bp, Penicillium chrysogenum
atgactgtacccaacgagagttccgaggatgtcaatgatttccttcagcgcatccgggaactaggcgaacgccgcgacaaggaagatgacgagcgcactaaaaagctagaggaggagatcctgcagggccggaaggaaaggcaagctcggagagctggtcgacaatgtgctgatatccggatgactcaaaaatagaacgtgcacgatcactggcccttaccgacgattcacccaccctcaatgttgcgcgactgagtgcttcctctattagtccccggcccatcgaccccccggaacacctcgagccgacaccgcaaacaccgcaaacgccagcacctgagccaaccctgagcgccgtggagtcgagccaagatatggaggtctccaacaccgacaagcggcggggatcggtcccagatttcggaatggattctcccacgcggacacgttcacccttgtcccgcagccgcgcggggaccttgtcatggcagcaacgcccctcgcgtgatttcgccgtgtcgcccggttcaacatccccaacccgctcaccaactcgcgcaagccacctgagaaatttgtctacggcatcggacgagaactcactatctcgactccaatttgggttcccacgaccatcgaaggatgctcctgtgctccctccatcaccggaccgtggggttgggtcgttagcgcacagtgcgaaggaagaacagacggatagccaaacagacgtgggcgtggggcatcaagagccagaagcgggtgaagaatcgagtaccgaactagataaacttgaggcagtagaagagagatcatcgtcgcctccgagaaccggttctcgcgatagcaacatgagccatcgcttctctgtatcatcggtttcggctgggttggggtcgccagtgcacctgtcagagactccgaagctcgagcctcgacagaatgattcctccctcgaggaatctgtgtcgccgtctccagcccagcggcggctgtcaccagaacgaacgcggtcgacctcacccaccaagggcctgggaggcttcgttcagagtgctatgatgagaagatcagatagtgtgtcaaaaaggtggagtgcacaagttccgcaggggcttgggcggtcaaattccattgtgtcaaatcgcagcagtgtggcaggtccaagtttgagtgaaatgacccctccaactctggggcgaattggacgtgaaccttcaactctcctgcaacgaccaggctccagccacagtgaggcagccaccgcaacaactgagcgaccaaccacacctgcggatagagacagtgtgaattttgaaaccagtccaggaaaatcattccgaactggtcattctcgttctgctagctctgctaccgcagaaggcagcgaagcccaaggtccctttgtctcaaaaaccatggatcccaggcgctggagccccaacaaggcttcttggttagagagtgccctcaaccgaccagagctaccacgacagaccaccagacccccctctcagcccaactgggccaaagaccggcagtcgcgaggtagcgtagatttgggacgagtaaacaatttcaaggaagtcactcctatcggtttgatgcgaacacccccaccagggactcaaacgaagctacctggtgtttctgtcccacaatctccgtcggttctcggtagccctgacgtcggacaaacgaaagaggaaacctcagcttctccaactcctgtcgaggaagctctcaatgctctatcaggcggcgcaccggcggaggaacataagcctgcctcccccgctgaaatggagaatgaatcgcaaaaagtacccgcgtctgaagagtctgagcctcaatctactcccactcgtagggcccctcccgactcgttgagccccaaaccaaacttttccatctctacttcctcgcgcggacccatttcacccaaggcgaagccacaatctcccgtgctggacttccgagcaaacctacggaaacgagaagttgtcaaagataacggagattccaaagaaccagaattcaagaatgtatttgggcgcctcaaaaagaccgaaactcgcaactatgttgcccctgatgagctcaagggcaatatactacgaggtaaagctgctttgaacgctaccggcggaccgaagaagacagagcgagtcgatgaatttaggaagagccttgtgtcacgcaaagatgaaatgaaagccggcggaggctccatcagacggaataccgctggagagcaggatgcgccgccaaaacaagccgaggtcgtaccagaagcaattgctatgcgacaaaatatgacccgggcaaatagcatcaagcaaccacctgtggatgcgctgatatcgcctactaaaagctttggttctcgagcctcgcaggacagaccaccattgtcgtccccgaatacacctctcaaaggcattgttccgtcgcgagcttctcaggaacaacaaccattgtcgccatctcctgccaatgatgagccgggctggcccttgaaagataccaatgcctcgcgtgcatctcaagaatcacaaccattgtcaccgttccctgctgatgatccgattgatgagccagagggagcaattccggcggcgagcgaccacaggcaaacaccggaggcgatatcttcaacaaaccaggaggacacgcgcgaagttgtggcgccagtcgagcccagcatagtgaagatgcaggagccttcagtcaagacactccggccagttcgtcaatggccaccggcccctgtcgaggaggctactgtgactccaagtccggcaggtaaaagcaaattggcgggccgaatcaatcctgcgctagctggccttctttctcgtggcgcgcccgccgctgacggaccgaagaagcagctgccaacccctgtctcagcacagagtgaccctgcttcgccatctgcgcctctcacccacatgacaaagggtcgtgctagaggcccgaagagacgacttccccagacatctgatgcctcgacgccgtccgctcgggatgatactaaggaggttggtgctatttcatgctctgaagccaccccgtcacagactcctgcaatccctgttgaatccctggacattgattcagagcacctgtcgcagcctgatgaaaaccctgttcctgacatcacgaactcctgttcagacagcacaggcaccgagcaacttccggaagtaaacactcctctccaggatacccttgaatgcgatacgcccgaaagcgcattcccgcaagcacttcagacacgttctctaacatcggatttcgacattttcccctccgccgatcttgaggcgacgcccagggaacccgaaagccctggagaggtgagtccatcaggcggaccgcctgtcccgccgaagtccgattctccctcgtcccccttgcctgcaacgccaaagccacaatggggccagcaaaaccggtttgcgtcctcgtcgccgtcccctctccgaaccagtcacaatgagaatcaaatggattcacctatgaatcaggagaagagcatccccggggttatcgtcgagtcagcacgcagttccgtctcacgacccatgagccatccctccccgccagtaccccctaaagacggcgatgttatgctccacaagccaaccgatccgcgcagactttcaagaaagatgtcggctccatcactggttgcgcaagccagtgaggcacgtgaggtaattgccggcttcttcaagacattcccccacgctcgaaaccggatggacattgatccgcagctaatgctgatgcgtaaaccggacgatataaagatcaggaccatgaagctacatatatgggagctcacaggtgatgggaggcgtcaagaacttccttcccaccaggagtacatcctataccaaggtagcatgtatctctgcgtgcacacatttgagaccggacggagtagcacttcggaagtatacctttggcgcggagacgacgtccccgaatcctcggtggagaatgaacaacccttcgcacgcaagatcgctcgtgataatagctccaagttgcaagtcattcggcagggcaatgaacctacccggttcatccaagcgcttggcggcatcatgatcacgcgtcggggatccagctctcgccacaattcgtcggctctctacatgctttgtggccggaaacacttgggcgagatgaccttcgatgaagtggattactcactgcgcaatctctgctccgggttcccttacgttgtctctgctccctttggcaagctctacctatggaagggcaaaggtagtggccctgaagagaccggcgcagcccgacttatcggcatggacctaggcctgactggagagttcgaagaagtcaacgagggtgaagagcccgaggatttcttcgatgtgttcgcaggccccagggaggctgcgccgcacatgtgccaagatcactggcagctcaagccgaaatacaaccactaccgcacgcgactgctccgggtcgaccacgaactgaacccgccaactcgtttctggaatatccgccgtccgggctcaagttcaccagtggtcaaggccaacgattgcgttcaagaaatcgagccattctgctaccgagatatcaccgagaaagacgtttacgttctggacaccttctttgagatctacgttattatcggcgatcaagcctcacagaagtctgccgatttcgcctcggcagtggtcttcgcgcacgagtatggtatccttgccacatccctccaggaccgaccattcattcccaaaagtttcgtggccctcggtggcgtccccgaccgctgccaaagcgcattccgtaaatggaacccacgcacccagcatgcgcctttcgtgttctctcttgatgttgttatcgaggcgattcggtcaccagagaattga

SEQ ID NO: 113 - DNA, 1554 bp, Verticillium albo-atrum
atggcaagcagagatagcttccacatcgaagtaccttcgccctcattgacggctgtaaacggcactcatccgctcaagtcaccctcgtcgctcaaaaatcatcgcacgcccagctttagccgggatggtctgatcagtgccgtgcaaaaggccagaaacatgtctcaatcatccgaccagcgtatcaacggcttcagtgatatgaacaaaacacccagtgacgaggggtcgaacccactgaagcgccgcaacaccgatgccggagttgactatccgcgaaggagggctaccatcgcttgcgaggtgtgtcgatcccgcaagtctcgctgcgatggcaccaagcccaagtgcaagctctgcaccgagctcggcgccgagtgtatctaccgagaacccggcatcaagctggatgcaggcgacaagctcattcttgaacgccttaaccgcatcgagagccttcttcagatgaacatgtggcctttaattcgcgaccttgtgtcacgaccgtacgatccgcaaatcctgctacagcttgagatggcgcgagagccgctgcactcgctgacgaagacgccgtgtgtcgacctgtccaacactacagcatacatcgaagcctattttgaccacgttaacgtatggtacgcttgcgttaacccttacacctggaggagccactaccggacggcgctatccaacggcttccgcgagggcgccgagagctgcatcgtccttcttgtactggctctgggacaggccagcttgcgaggaagcatctcacgcatcatgcctggagaagacccccccggactgcaatacttcaccgctgcatgggctcttctcccgggcatgatgacttcaaataacgttctcgcagcacagtgccacttgctggcttctgcgtacttattctacctagtccgccccttggaggcctggaacctgctttgtactaccagcacgaagctgcagcttcttctcatgtcaccgaacagggtaccgcccaaccagcgggagttgaccgagcgcatttactggaattctctcctcttcgagagcgatctgctggcagagttggatctcccgcactctggggtggtccagtttgaagagaacgtcggacttcccggtggctttgagggagaagaacaggaagcgattggacgggatgatctttggccctacatcttggctgtcttggacaatgagcaggctatcttggaccctgcagtacgagacagttgccacaagtgcttggaggcttctgtgcgccaactggaacacatctctgcacaccatgcaggccacatgccctatttgtggcaaggtgcactctcgattgtatcccaggcactgctcgtcatgggcgccaccatgtcaccctcgttgggtagcatccttctgacgctatgcggtagccgtgaggctatcgaccagatcatcaatgacgtcgttatggaggtcgaacgttattcaaacctagcgccgagtctgagcttggcggctgagatcattaaagaagccgaagtgaggaggcgagcattcctcagcgggtga

SEQ ID NO: 114 - DNA, 2100 bp, Nectria haematococca
atgtctccatcttcgacgggcgaatctcctcactcagcatccatgactgctgcggccaggccgtttgccgtcccttcacgcgacagcttctcgctagaaattccggcggcttcactcacagccatgtccaacgagttaggaataaaatccccagttactttcaagaaccagcgcacagctagtttcagcagagacaccatgttgagctcagcacaaaaaccccgtcatctatcccagtcatctgagaacagaaccgatacaatgaccaacggcacacaaaaactcccgagtgatgaaggctcgaacccgctcaagaggaggaataccgaaacaggtgtcgactaccctcggcgcagagccaccatcgcttgcgaggtttgccgttcgagaaaatcccgctgtgatgggactaagcccaagtgcaaactatgtaccgagcttggtgctgaatgcatctatcgagagccgggtatcaaactggatgccggcgacaagctgatcctcgagcggttaaatcgtatcgaaagcctgctgcagatgagtatggtgagcacatcaccaaacggtcttaacttgacccaagactcgcctggcatgagcaatggcacggggcttagtggtgacaaccttgttatggccgtcaaccccaccaactttgtctctattcccaacggtggatttggcacatggtccgcccagcccattggaaccaacatctctaccatgcccaaggttcacaccaacgctgctatgcatttgttgcaatggcctctcatcagagatttggtttctcggccatatgatccgcaaatactcctccagttggaaatggcccgagagccgcttcattctctgacgaaaactccttgcgtggatctctcgaacacccaggcatatatcgaggcttacttcgagcgggtcaacgtttggtacgcttgcgtcaacccttacacctggagaagccagtaccgcaccgccctttccaacggtttcagagaaggaccggagagctgcgttgtacttcttgttttggcacttggccaagcaagtctacatggaagcatatccaggatcgtccctcaagaggacccacctgggttgcaatacttcacggcggcctggtcacttcttccgggcatgatgaccgccaacagcgttgttgcagcccaatgccacctacttgctgctgcatatcacttttatctggtccggcccatggaagcgtggaaccttctctgcactaccagcacgaaactccagctcctcctcatggcaccgagccgcatcccgagccatcaaaaagagcttgtggagcgcatttactggaacgctctcctgttcgagagtgacctactcgcagagctcgacctacctcactcgggcgtggtgcaatttgaagaaaacgttggcctcccgtgtggattcgaaggtgaagagtcggagcaggccgttgggcgtgacgagctttggtacttccttgctgagattgccctgcgtcgactcctgaatagagtgagccaactcatctattcgaaagattcgatcgcatcaacaacaagtttggagccagttgtcggggaactcgactaccagctaactcagtggtacgaaagcctgccattaccactgcagtttccctttacacgaaccgtccttcaggaccctatccaaacggtgcttcgacttcggttcttcgcttgccgcacaataatctaccgaccatacatcctggcagtattggacaatgagcaggcagttttagaccctgctgtgcgggagaactgtcacaaatgtctcgaggcttccatccgccagttggaacacatccacgaacatcatgctggacacatgccatatatctggcagggggcattatccatggtctctcaaactctactcatcatgggcgccagcatgtcaccgtccttacttggcatcttgctgacattggtgccccatcgagaagctctggatcaaatcatcaacgaggtggtcctagaggttgaacgatacgcaaccctggctccaagtctaagcctagccgccgagatcatcaaggaagctgaggtgagaaggcgagcgtttctgggaaccccctag

SEQ ID NO: 115 - DNA, 2139 bp, Pyrenophora teres
atggcaggaatcactccttctccagacgttagtcccgtatcgtcagcaacgaccaatggaggcttccccagggatgccttctccctcaatctctccactttgcccgacgccaacagctttatcctcaagtctgccctgacctctcctcatcttctcgactccccaaacggtctcttctcaggaggcggccgtttgagtaatcccttcaagaagcggccccgcaacatgtctcaatcatccggtactgatcgggaaatgtcaaatgaaaacactccacccgcctcaaacggtattgcacccacaagcaacgggaacgacggctccaaggcagagccccggccagctacaaagaagcgcccaagtaccgacacaatagactatccacgacggcgtgcgactatagcgtgcgaaatatgtcggtcgcgaaagtctcgctgcgacggcacacgaccaaagtgcagactttgcacagaactgaatgccgaatgcatataccgtgaacccggtatcaagcttgacgctggcgacaagctgatcctggaacacctgagccgcattgaaggccttctacagtctggcctcaccagtaactattcattgtcgtcgcattccccagctgcgagcaactcaacgagcgacgattttctcgctcgcagtaccggccacataccccatctcggtatggttcagccgatcaacggcataggaacatggaccaatcatccctcaaatatctcgaccatgccaaaaacacacaacacagcagcgctgaatctgctgtcctcacccatgatccgggaactggtgtctcgtcaatatgatgccaagatactccttcagctagagatgacccgtgaatcagtaagcctcggtacaactcgcggtctagacctgtccaacactggtgtgtatgtccaagcatactttgagagagtaaacgtcttctacgcagtcgtcaatccatatacatggagtggccattaccagactgcactcagccatggattccgagatgggcctgaaagttgcattgttctcctagttcttgcgctaggtcatgctgcaagcaccgggagcataacacaacagaacccagacaaggatccccccggcttggcgtactttgccgcagcttggagtctgttaccaaccgtcatgacgaggaataacatggtcgccgcgcagtgtcagatccttgctgcagcatatctagtgtaccttgtccgtccggtcgaagcctggaatgtgctatcgggtgcgagtatgaagcttcaacttcttctaagtgcacctggcagagtgtcgccagcggaagaagaacttggcagaagagtgtattggaatgccgtcatgatcgagagcgatcttctagcagaactagatcttcctcattctggcattgcgcagtttgaagagggcttttctttgccaaccgggtttgaggatttagggaccgaagcagttggtcgggatgagttgtggtactttcttgccgagatcgcccttcgaaggttgctcaatcgggtgagctcgatgctctacatccggacgacaccgtattccaaaggcccggctgccacctcgattgctcaactagacccgctcgtcgtggaactagattttcaattgaatcagtggtatgccggactaccaccagccatgcagttcccactcgatagggtaccgttacaaaatcccgtgcaaacagttctcagactacgctactttgcatgtcgcacaatcatctttcgaccatacgtactgcttgtgttgcaggatgaaagcctggcaatggattccggtgtgcaggacaactgccacaagtgcctggaagcatgtgttcgtcagctagagtacattactgcgcaccacgcgggacatatcccctatctgttccagggcgccctctccatcatctcccaaactctgctcatcatgggcgcaaccatgaccccttcactttcccagctgcttcctccaccggcgaccatggacgacatcataaacaatgtggtccttgaaatggagcgctacgcacatcttgcgcctagccttcgtctctccgctgagattattcgcgaggccgaaggaaagcgacagatgtggttacggacagcgggcctcaagttcgaagtatga

SEQ ID NO: 116 - DNA, 2133 bp, Sordaria macrospora
atgtcgccgtcttccaacggcgactctcccgcttcggtagtgggcagcatgaccatggccgcccaggccgttcctaacgctgtaaggcaataccctctgccgaatcgagacttcacaatcgaaataccctcgccccaacttgcacccactgtcaatggggtcaacaccataaagtcaccctccactctcaagtctgcccgtgctcccaatttcagccgggaaggcattcttggatcggcccagaaagcccgaaacctctcgcagtcgtccgaaaaccggcctgacaatgtcaacgtttctaatggttatcaaaaggctcctagcgaggagagcaccaatccgctgaaaagaagaaatacggatgctggtgtcgactaccccagaaggagggcaaccattgcgtgcgaggtatgccgctcgagaaagtcgcgatgtgacggcacaaaaccaaaatgcaagctgtgcacggagttgggcgccgagtgcatatatcgcgagcctggtatcaagctggatgccggcgacaagctcatcctcgaacgcctcaacaggatagaaagtctgctttcgataaacatgggcttagccagtcataccaatggcctagggctatcccataactccccggggatgagcaacgggacagggctgagtggtgacaacctgatgatgcaaaatcctgacgccgcctgctttgtctcggtgatccccagcggaggactgggcacatggtctgccaccgccaccaacaacttatcgacaatgcccaaggtccacacaaatgccgccctccacttgttgcaatggcctatgattcgagatcttgtttcacgaccttacgacccacaaatccttctccaactcgaaatggccagggagccactacactcgctcacaaagaccccctgtgtggacctttccaacaccaccgcctacatcgaagcctattttgatcgtgtcaacgtttggtacgcctgtgtcaacccctacacatggaggagccactatcggattgctctctcgaacggtttcagggaaggaccagaaagttgtattgtgcttctcgtcttggctctcggtcaggcaagcctaagggggagcatatccaggatcgtgccacacgaggatcccccgggcctccaatatttcacggccgcttgggccttgctaccgggcatgatgacctccaacagcgtcctcgccgcgcaatgccaccttttggccgccgcctacctattctatctcgtccgacctttggaagcatggaaccttctctgcacaacaagcaccaaactgcagctcctcctcatgacgccgaaccgggtgcctgtcgaccaaagggaattgagtgagagaatctactggaatgctctgctgttcgagagtgacctcctcgctgagctagaccttccgcattctggggttgttgcttttgaagaaaatgtcggtctcccatgtggctttgaaggggatgagcaagaggcagttggtcgcgatgacttgtggtattttctcgccgaaatagcacttcggcgactactcaaccgcgtcagccagctcatttattccaaggactccctggcctctacaacgagtctcgaacccatcgttaccgagttggatttccaattaacgcagtggtacgagagcctgcctctaccgcttcagttcccttttactcgggcaatgctcccagatcctgtccagacggtgttgcggttgcgcttctttgcttgccgaactattatttaccggccatacattctcgcggttctcgacaatgaacaggcaatactggacccctcagtgcgtgaggcgtgcacaaagtgtctggaggcttcaatcagacaattggagcatatcagtgcgcatcacgccggacacatgccgtacctttggcaaggggcactctcgattgtatcgcagacacttctgatcatgggtgctaccatgtcaccgtcactcaacagtattctggtgagcttggtctcacaccgcgacgttatcgaccagatcatcaacgatgtcgtcatggaaatcgaacgttattccgtactctcgcccagtctgagcttatcggcggagatcattaaggaggcggaggttaggcgacgaacattcctcagcggttga

SEQ ID NO: 117 - DNA, 1929 bp, Magnaporthe oryzae
atgtcgccatcgtcgacaggcgagtcgccgcctacgatattaaacggtcattcggcaccagcactaaacacttccaaccctccaagcgccctgaagtcgcctgcaaccgtcaaaagccaacgcaccccgagcttcagccgcgatagcattctcggatccgctctcaaggccggcgcctctcagcgggctgatttttctggggacggcaggctaggagatcctaatgggctgcagaaggtttctagtgatgaagggtcaaaccctctgaaaaggagaaacacggacgctggtgttgactatccgaggcgacgagcaacaatcgcctgtgaagtatgtcgctcccgcaaatctcggtgcgatggcaccaaaccgaaatgcaagctctgcctggagctcggtgccgactgcgtttaccgtgagcctgggattaagcttgacgcaggtgacaaactgattttggagcgcctcaaccgtatcgaaagcatgctgcagatgaccctgccaccaaatggcatcggtctgggaggttcgccgaacctgagcaatggaactggacatctcagtgcggatggcattctaactggtggtccatttctctcggtcatgcccaatgctgcattgagccagtgggcaactgctcccaacatttcgacgatgccaaaggtgcacaccaatgcggcactgcatctcctacaatggcccctgatacgagaactcgtatcgaggccctatgacccgcagatcttacttcagctcgagatggcaagggagcccctacactccctaaccaaaaccccttgcgtcgatttatccaacaccgcagcctatattgaagcgtacttcgagcgagtcaatgtttggtacgcctgcgtgaatccttatacttggaggagtcattaccgcatcgctttgtccaatggtttcagagaaggtcccgaaagctgtattgttctcctggtgttagcactcgggcaagcgagtttgaagggcagcatatcccggattgtgccacatgaagacccgccgggcctgcagtacttcaccgctgcttgggctctactgcccggtatgatgacatccaacagcgtcttggctgcgcagtctcatctgcttgccgccgcctacctcttctacttggttcgacctcttgaggcatggaacctcctctgcacaaccagcaccaagctacagcttcttttgatgtcgccgagcagagtgccttcggatcaacgagaactcaccgagcgcatctactggaactcgttattgttcgagagtgatctcctggctgagctggacttaccccactctggcgttgtccagttcgaagagaatgttggtcttcctggaggctttgagggcgatgagaacgaagcagttggccgcgatgacctgtggtattttctcgccgagatcgcgcttcgaaggttgctcaaccgcgtcagcaaccttatctattcgaaggattcaatggcctctaccactagcctagagcctgttgtggcagagctcgatttccagctcacgcagtggacgatcatatatcggccctacattcttgcggtactcgacaacgagcaagccgttttggacccagcggtgagagacagctgtcacaagtgtttggaggcttcgatcaggcagttggagcacatagcagcacaccatgcgggacacatcccctacctttggcaaggagccttgtctattgtgtctcagacgctccttgtcatgggcgcaactatgtcaccatcgctttctagtatattgtccaccgtggttccccacagggaaacactggatcagattctaagcgaggtgattatcgagatagagcggtacgccgtccttgcgcccagtcttagcttggctgcggacattctcaaagaagcagaggtcaggaggcgagctttcctcatgagtgggtag

SEQ ID NO: 118 - DNA, 2091 bp, Gibberella zeae
atgtccccatcatcgacaggcgaatccgctcactcaatctcaatcaactcagcccgaccattcaccgttcccgctcgcgacagcttcgcactcgaccttccaatgtcgtcacttgcaaccatgtcggccgacgcctcactcaagtcccccgtcagttacaaaaatcagcgtacgcccagcttcagcatggtcacgtctcaaaaagcccgccacctatcgcaatcctccgataataacagacctgacaatatgtccaacggtggacaaaaggtctcaagcgacgagggctcaaacccacttaagaggagaaatacagaaaccggggtcgattatccccgccgcagggctactattgcttgtgaggtttgccgttcgagaaagtcgcggtgcgatggaacaaaacccaagtgcaagctctgtacggagcttggcgctgaatgcatctaccgagaaccaggaattaagctcgacgctggtgacaagcttattttggagcgcctcaatcgcattgaaagccttcttcagatgagcatggtaaacacaacagcaaatggacttggcctgactgaaaactcacctggaatgagtaacggcaccgggctcgatggcgacaacctgatcttgtcagccaatgcggccacgttcagctctatccctaatggcggatttgggacttggtcggcgcaaccagtgggaaccaacatctctaccatgcccaaagtccataccaatgccgccatgcatctactgcaatggcctctcatccgagatttaatttcgcggcaatgcgatcctcaggttctgctacaattggaaatggcgcgagaaccgcttcacactcttacgaaaacaccatgtgtggacttgtcaaatactcaagcatatatcgaggcctattttgagagggtcaacatatggtacgcctgcgtgaacccatatacttggagaagccaataccggaccgccttgtccaacggattccgagaggggccagagagttgtatcgtgctccttgttcttgctctaggccaagcaagtctgcacggtagcatatccaggattctcccgcacgaagatcccccaggtctacaatactttacagcagcttggtcattgcttccgggattgatgactgccaacagtgtggtggcggcgcaatgtcatctcttggctgcagcgtaccacttttacctcgtacgacctatggaggcatggaacctactttgcactacaagcaccaaactgcaactccttctcatggctcctagtcgcattcccagtcaccagcgagagctcgtggagcgcatttactggaacgccttactcttcgaaagcgatcttctcgcagaactcgacttgccccattcaggtgttgtccagttcgaggagcacgtcggccttccaggcggattcgaaggagacgagtcggagcaagtcggtcgagatgagctctggtacttcttggcggagattgccctccgtcgtttactgaacagagtcagccatctcatttactccaaggactctattgcaaatacacagagtctagacccagttgtcgcggaactcgactaccaattgagtcagtggtacgagagtctgccattgccactgcagtttccttttacccgaaacgcccttcaggaccctgtccagacagtacttcgcctcagattctttgcttgccgcaccatcatttaccggccgtacattctagccgtgctagataacgagcagcaggttctggatcccgccgtgcgggaaaattgccacaaatgcttggaggcttcccttcgccagttggaacatatacacgaacaccatgctggacatatgccatatatctggcagggagctttgtcaatggtgtctcaaaccctgcttattatgggtgccaccatgtcaccatcacttctcaatatattgcttacattggtgccaagtcgtgaggcgctagaccagattatcaacgatgtggtaatggaagtcgaacgatacgcgactctggccccaagcttaagcctggcctccgaaatgctcaaagaggctgagtactgcttcagcatcattagtcccagagtcttggattaa

SEQ ID NO: 119 - DNA, 1899 bp, Aspergillus nidulans
atgtcttcctctccggagagagatagggaaggaatcttggattccacctcagcttcactaaacgagttaataaacaagaagcgctccaattccgaagcaacagaatatcctcgaaggcgcgcaaccatcgcttgtcaaatctgtcgtctacgaaagacgaggtgcaacggagctcgtccaaagtgccagctctgcactgaccttgatgcagaatgcgtctaccgagaacctgggatcaagctggatgctggggacaaattgatcattgaaagacttgcaagaattgaagggctcttacaaaccagcttagcagcacaaaactcacagcttacgttgtcttcgacttctcccgcaaccagtaacggaaccaacgttgggagcgacgacacggttgcgaaagcgtcaactcatctggcggtaaccgggagaactacttccattgtaggactcgcctcatgggcgaacccgccgacaagcatatcgaccatgccgagagtacacaccacgcctgcattgaaccttttgaaatggcccctgatccgggacttagtggctcgaccatatgattcccagacccttttgcagttggaaatggctcgcgaaccgctgaaaatgacacctcctatggccgtagatctatcttgtgcgccgctttatatcagaaccttctttgagaaagtcaacgtctggtacgcctgtgttaatccatacacctggtcaaaatactatgacgccgctgtatccctcagctttcgagagggtccagagagctgtgttgttctcttggttctagctcttggttgcgccgctcaatgcggcagtattgctttaatatcaaccgacagagatcctcctggcgtgccgtattttatagcggcctggaatcttctaccatcagtcatgatgcgtaattcagtcgtcgccgcccaatgtatcatcctggccgctgcttacttgttctacctggttcgaccactcgaggcctggacactactttcgaatgccagcatgaagctacaactattattcggcaacccgtctcgtgtgcctgtccagtggagagagctgagtgttagagtgtactggaacgccctactgtacgaaagtgatttgttggccgaattggatttaccgcactctggaatcgtgaattttgaagagctggtagatcttccgggcgggtttgatgagatcgaagatgatgaagacgaagacgacggcgatactggcaacaaactggtcagtcccattggttgcgacgaactctggtattttctagccgagatcgcccttagaaggctactcaatcgagtcagtcatatgctctatcagaaagacaacagcctgacactggcttctctagcgccaatcgtctcagagttggattttcagctgtcccaatggtatgaaggcctacctcagcccgtcagatttcctctgtcccacgctcctatatcacatccagtgcagactgtcctccgactaagatactttgcctgccggacgatcatctaccgaccgtacatcctggctgtcttcgagaacgagcaagcttcaggggattcgtgggtgagggaatgttgccggcgttgcttggaggctacgctttatcagctggaaagcgtaaccacccatcgtgagggtcatctcccgtatttgtggcagggcgctctatcaatggtctcgcagtcacttctaatcatgggcgcaactatgtcccctgcgctctcaagtctactcccccctactttgcgcgtggacgaaattatatccagcgttatagtggaggtcgacaggtatgcgcatcttgcgccaagtctcaagctatcctcagaaatcctccgtgacgccgaaaggcggcgtcagatttgtctcagatcctcgggaagcagagtataa

SEQ ID NO: 120 - DNA, 1902 bp, Aspergillus fumigatus
atgacgccctctccagagagagacttggtcctcgactcggccactgcaggtggcactaccgaatctcaagtcagcaagaaaaagcgatccaactcggagctgacagaataccctcggagacgtgcgacgatcgcaatatgtcgcttgcgaaagactcgatgtaacggcgcacgcccgaggtgtcaactttgtacagacctagacgcagactgtgtctacagggaaccaggcatcaaactcgatgctggtgacaaactaatcattgagaggttgaatagaatcgagggtctacttcaatctactctggtgggacaagcaactcatctcccattgtcttcaacatcccctaccaccagcaatgatacgaatgcgggcagcgatgatgcggtcgccaaggcgtccactatcgccgccatgtctgggagaacctccgttgccggccttgggtcctgggtgaacccaccaacgagcatctcaacgatgcccaaggtgcacactactcccgcgctacaccttctacaatggcccctcattcgggacctggtcgctggtccctacgatccacagacgttattgcagcttgaaatggcccgcgaaccgctgaggcttccttccgctgcagggttcgacttgtccaatacaacaacgtatgtacagtcttttttcgagcgggtcaatgtctggtacgcctgtgtgaacccatacacttggacacgctactacagtagagccgtctctctgggattccgagagggacctgaaagctgccttgtcctcttagtcttggctctcggcagcgccagtcactacggaagcatctcgttcattccttcagatatggaccccccaggactaccttactttgcagcagcgtggaatcttctgccatcggtaatgatgcgcaactctgttctggctgctcagtgcatcatccttgcgtctgcctacttattctacctagtcagaccgctggaggcttggaccctcctctccaatgctagtatgaaattacaattactcttcggggaccccgcccgtgtaccccttcagtggagagaactgagtgtgagagtgtactggaatgctctcttatatgagagcgacttgctggcagagttggatctgcctcactcgggcattgtgcacttcgaagaagttgtcgaccttcccggtggcttcgaggaggaggaggacgaagaagatgatgaagctgacaatgaagatcgtcaaagcagcttggtggagggctcggtaggccgcgaggaactgtggtatttccttgctgagatagctcttcggcgactcttgaatcgcgtcagccatatgatataccagaaagacaactcgctaactcttggatcacttgggcccattgtctcggagctggatttccaactttcccagtggtatgaaagtctccctcaaccagtccagttccccctcaaccacacaccgatttccaaccccgtccagacagtcctccgattgcgatactacgcgtgccggactataatataccggccatacatcttagctgtctttgagaatgagaacgctgcaactgatcaggtagtaagggaatgctgccggcggtgcttggaggccacgctgcgccagctggaaaatatcaccagtcaccgcgaaggccatcttccctatctctggcagggcgcgctctctatggtgtcgcagacattgttgattatgggggccacgatgtcccccggactctccagtttattacctccgggattccgagtggatgcgataatatccagtgtgatggccgaggttgagagatacgcacaccttgcgccgagcctcaaattatctgcagagatcattcgcgacgcagagaagcgccggcaaatttgtctcaggtcgaccagtcgacgagtatag

SEQ ID NO: 121 - DNA, 2241 bp, Neurospora crassa
atgtcgccgtcttccaacagcgactctcccgcctcggtagtgggcagcatgaccatggccgcgcaggctgctcccaacgttgtaaggcaatatcctctgccgaatcgagacttcacaatcgaaattccctcgccccaagttgcacccactaccaatggggtcaacaccgtcaagtcaccctccactctcaagtcgtcccgtgctcccaacttcagccgcgaaggtattcttggatcggcccagaaagcccgaaatctctcgcagtcgtctgaaaaccggcctgaccatgtcaatgtctctaatggctttcacaaggctcctagtgaggagagcaccaatccgctgaaaagaagaaatacggatgctggcgtcgactaccctagaagaagggcaaccattgcgtgcgaggtatgccgctcgaggaagtcgcggtgtgacggcacaaaaccaaaatgcaagctgtgcacagagttgggtgccgagtgcatatatcgcgagcctggtatcaagctggatgccggcgacaagctcatcctcgaacgcctcaacaggatagaaagtctgctgcaattaaacatgggcctaaccggtcatacccatggcctaggattatcccataactccccggggatgagcaacgggacagggttgagtggtgacaacctgatgatgcaaaatcccgacgccgccggctttgtctcggtgatccccagcggaggcttgggcacatggtccgctaccgctaccaacagcttgtcaacaatgcccaaggtccacaccaatgccgcccttcatttgttgcaatggcccatgattcgggatctcgtctcacgaccttacgacccacaaattctcctccaactcgaaatggccagggagccactccactcgctcacaaagaccccttgtgtggacctctccaacacttccgcctacatcgaagcctatttcgatcgtgtcaacgtttggtacgcctgtgtcaacccttatacatggaggagccactatcgtatcgccctctcgaacggtttcagggaaggaccagaaagttgtattgtgcttctcgtcttggctctcggtcaggcaagtttacgggggagcatatccaggatcgtgccacatgaggatcccccgggcctccaatatttcacggccgcatgggccttgctaccgggcatgatgacctccaacagcgttctcgccgctcaatgccaccttttagctgccgcttacctattctacctcgtccgacccctggaagcatggaaccttctctgcacaacaagtaccaagttgcagctcctccttatgacgccgaaccgagtgcctgtcgaccaaagggaactgagtgaaaggatctactggaatgctctgctgttcgagagcgacctcctcgccgagctggaccttccgcattctggtgttgttgcatttgaagaaaatgttggtctgccatgtggcttcgagggggatgagcaagaggcagttggtcgcgatgatttgtggtatttcctcgccgaaatagcacttcggcgactactcaaccgcgtcagccagctcatttactccaaggactccttggcctctacaacgagtctcgaacccatcgtgaccgagttggatttccaactaacgcagtggtacgagagtctacctctaccgctgcaatttccgtttactcggacaatgctcccagatcctgtccagacggtgttgcggttgcgcttctttgcttgccggaccattatttaccggccatacattctcgcggtcctcgacaatgaacaggcaatactggacccctcagtgcgtgacgcgtgcacaaagtgtctggaggcttcaatcagacaattggagcatatcagtgcacatattctggtgagcttggtctcacaccgcgacgttatcgaccagatcatcaacgatgtcgtcatggagatcgagcgttattccgtactctcacccagtctgagcctctcggcggagattatcaaggaagcggaggttaggcgacgaacgttcctgagtggttgaggaatcgctttactacactcgatgtcatagacacaaaaggtcaaacggtcccatcaaactcgccacatccaaacctttcaatcacccaaaagttaaaccgccagcagttgaacctatggtgttctgtcatggcacgaagcaagctacaggtgcatctggtcctccacggatgcaacgccagtacaagatgtatttttttcaggactg

SEQ ID NO: 122 - DNA, 1917 bp, Aspergillus oryzae
atgtctccttctccccaaagagacagagatactcacgttgaagcagtcgccgctgtgactgcttctgacgacttccagtcgagtaagaaaaagcgatccaattctgatgtggtcgaatatccccgaaggcgcgccacaatagcttgtcagatatgccgcctgcggaaaacaaaatgcaacggggcgcgcccaaagtgccagctctgtactgatctagacaccgaatgcgtctatagagagcctggcatcaaactcgatgccggtgataaactgatcattgaaaggcttaatcgtatcgagggactcttgcaatcaagtctagcaagccaggcagcacattgttcattaccctctacgtcaccggcaaccagtaatgataccaacatcggcggtgaagatacaccggttaagacatccagcgtggctgtcatgtctgggaaaacgtcagttgttggactcgcctcttgggctaacccacccacgagtatctcaacgatgccaaaggtacataccactcctgcgttacatctgctacagtggcctttgattcgggggttggtggccggcccctatgaccctcatacactattgcaactggaaatggctcgtgagccccttaggatgaaagcccctaaggagttggacttaacaaatgcaacgatctatatcaggaatttttttcgacgtgtcaatgtttggtacgcctgcgttaatccatatacatggtctcgatattacaaaaccgccgtgtcactcagctttcgtgaaggatctgagagctgcctggtcctcttggtcttggctcttgggtgtgctagtcactatggcagcatttcctctgtctcgccagacaaggaggccccaggcctaccctactttgcggcagcttgggaccttctccctatagttatgatgcgcaactctgtgcctgctgcacagtgtatcatactggcatcagcctatttattctacctagtcagacctctagaggcctggacccttctgtcaaatgccagcttaaaattacagctccttttcggcaatccatctcgtgttcctcttcagtggaaggaactaagtgtgcgaatatactggaacgctctgctctacgaaagcgacttgctagcggaactagatctaccacattcgggaatcgtccactttgaagagctagttgatctacctggggggtttgaggaggaggatgacgaagagtaccaagaggctgaggatgcacatggtgaaattgcatctgaaactgagcctgttggtcacgatgaattatggtacttcctagcagaaattgcattgaggagattgcttaaccgtgtcagtcacatggtttatcaaaaggatagcccattaactcttggaacacttggacctattgtttccgagctggactatcaactctctcagtggtatgagagtctgccccaacctgttcagttccctctctctcgtacacctgtgtcaaactctgtccagactgccctacgacttcgatattttgcatgcaggacaattatctaccgaccttatatgttggctgtttttgaaaatgagcagacatctttagacccagtggtaaaggagtgctgccggcggtgcatagaagccacaatacaccaactggagaatataacaagccaccgcgaaggtcatctaccatatctttggcagggagccttgtccatggtgtcacaaacgctactgatcatgggggctactatgtctccaacgctttctgccttgctgccccctgcagaccaagtagatcggatgatatcagaagtagtggcagaggtcgagagatacgcccaccttgccccgagtttaaagctatcagcagaaatcattcgggatgcagaaaaaagacgtcaaatctgtttgaggtctacagggcgttgcacttaa

SEQ ID NO: 123 - DNA, 1956 bp, Aspergillus niger
atgtcttgtcaggaacttgacagtgatactattctcgattcaacctcagcaaaaaagcgcaacaattctgaagcaaccgagtatccccgaaggcgcgcaactatagcgtaccacccggtgccgtcacatttcctatcccctggtactagctctgctacgaaaacaagtaatactaatgtgcgtgcgctgctacagtgccagatctgtcgtctacggaaaacgagatgtaacggagcccgcccaagatgccagctctgcgtagacctggatgcagattgtgtctatcgtgagccgggcatcaaactagatgccggtgacaaactgattatcgaaaagctgaacagaatagaagtcttacttcagtcgaagtttgcagaccccatcggccagtctcccctgtcatcgaattcttccacggctgccaaccttgtccaaattagtagcgatgatgctgtcagtctcgccaacatacctaccaggacaatcgcggtgggtcttggatcatgggcaaatccaccgacaagcatctcaactatgcccagagtacatacgacaccggctttgcaccttctacaatggcctctcattcgagaactggtcgctgttccttatgatcctcatacacttctacagctagaaatggctcgtgagccacttcggctcgaacctcctgtgagcttagatttatcaaacgcacttactcacgctcgactttttttcgagcgcgtaaatgtttggtacgcttgtgtcaacccattgacgtggcctcgctattacaagatggctctttctcgggacttcgagagagggcctgaaagctgcgttgtactcttggttttggcactgggcagtgccagtcaatatggaagtatatcttgcctttccgcagatgaggaacttccaggactatcatatttctccgcagcttggacccttttgccggctgttatgacgcgcaattcggtgcttgcagcgcaatgtgtcatcttggcatctgcatatttattttacatggtcaggccccttgaggcctggacgctactatcaaatgccagcatgaaattacaattactcttaggtaacccctctcgtgttccggggcaatggaaggagctgagtacaagagtgtactggaacaccttactatttgaaagtgatttgcttgccgaattagacctaccacactcggggattgtgcattttgaagagctcgtcgatctccctgggggctttgaaccggaagatgaagaagatgaagaagacgaaggaagcatacgaattgaagagaaactagtagatgcgatgataggtcaggatgagctctggtatttcttggctgaaattgccctaagaaggctgctcaacagagtcagtcatatgatctaccaaaaagacagcatcttgacactcgcatctctcggtcctatcgcctcagagctagatttccagctgtctcaatggtatgaaagccttcctcagcctgtccggtttcctctatctgggggcccaactttaagccccattcaaacagttttaaggcttcgctactttgcctgccgtacaataatatatcggccttacatcctggcggtcttccagaatgagtatgcatgcagtgacccgacagtaaaagactgctgcctgcggtgcttggacgcgacattgaatcaactcgagcatatagacagacatcgtgaaggtcacctgccgtacctctggcaaggtgccctttccatggtctctcaggcgttgttaatcatgggggcaaccatgtcaccgactctctcatcgctgttgcctccagcgactcagctagacggtatcatatctggcgtcataacggaggttggcagatatgcgcggcttgcaccaagtctaaagttatctgccgagatcattcgtgatgcggaaaagagacgccaggtgtccctcgcgtcagcggccagacgaggttga

SEQ ID NO: 124 - DNA, 2133 bp, Leptosphaeria maculans
atggccgggatcacgccctctccagacgttagtcccgtgtcagcagcaaccaccaatggccaattcccgcgggactcgttctgcctcaacctttccaccttgccggacgcaagcagttttcttctcaagtctgctcttcggtcgcctcatcttctcgagtctccgaatggactcttctcaggttgcggtggtcttagcaatccgttcagaaaacggccccgtaatatgtcgcagtcttctggcacagaccgggagatgtcaagtgacactccacctgcacagacaaatggaatagcaccaacaagcaacggtgccaatgggaccgactcgcggccatcgtcaaagaagcgacctagcaccgatactatagattacccaaggcgacgcgcaaccattgcgtgtgagatatgtcggtccaggaaatcacgatgtgatggcaccaggccaaagtgcaggctttgcaccgaattgaatgcagaatgcatttaccgagaacctggaatcaaactggacgccggcgacaaattgatcttggagcacctcaaccgcatcgagggcctgcttcagacagggctcaccagtggcttctcgctgtcttcacattcaccgactgccagtaattccacgagtgaagactttcttggccgcagcaccggaaccatgtcccatctgggcatggtccaaccgataaacggcatcgggacatggacgaaccatccgttgaacatttcgaccatgcccaaaacgcacaacactgcagccttgaatctcctctcctcgcccatgatccgagaacttgtatcccgccagtacgatgccaaaatcctcctgcaacttgagatgagtcgggactctgtcagtcttggtacaagtcgtgggttggatctatcaaacaccggcgcatacgtccaggcctactttgagagagtcaatgtattctacgcctgcgtcaatccatatacgtggagtagccactatcagactgcactcagccatggatttagagacggtcctgagagctgcatcgtgctacttgtgctcgctctgggccatgctggcagcactggaagtataacgcaacaggaccctacaaaggaccccccgggcatggcatactttgcggcagcttggaatctgcttccaacggtcatgacgaggaataacatggtcgctgcgcagtgccagatcctagctgcagcctaccttgtgtatcttgtgcgcccagtcgaagcctggaacgtgttgtcaggtgccagtatgaaactgcagttgctattgagtgctcccggaagaatctcaccagcagaggaagagttgggcaagagagtctattggaacgcagtgatgatcgagagtgatctcctggcagaattggatcttccgcactctggcattgcgcaatttgaagaaggcttctcgttacccactgggttcgaagatttgggaacggaagctgtcggcagggatgagctatggtatttccttgcggagattgctttacgccgactgctcaaccgcgtcagctcaatgttgtacatacggacaacgccttactcaaagggacctgcagccacttccatcgcccagctagatcccctggttattgaactggacttccaactgaaccaatggtatgcagggctaccgcgagccatgcagtttccgcttgacagagtaccactgcaaaaccctgtgcagacagtacttcgattgcgctacttcgcctgtcggacgatcattttccgtccatatgtacttctcgttctccaagatgagagtttagccatggattcgagcgtccaagacaattgtcacaagtgccttgaagcctgtgtgcgccagctggaatacatcacagctcatcacgccggacaccttccgtacttgttccaaggcgcactatctatcatttcacaaaccctactgatcatgggcgcgacaatgactccttcgctttcacaattacttcccccgccagccaccatggacgatataatcaacaatgttgtcctcgagatggagcgttatgctcatcttgcacctagtctacgcctgtccgccgaaatcatccgcgaggctgaagggaaacgccaattatggttgcgaactgctggtctcaagttcgaagtgtga

SEQ ID NO: 125 - DNA, 2079 bp, Glomerella graminicola
atgtccccgtcgtcgacgggtgactccccctgctcggccacgggcaacgctgggaggccctttcatgtaccgtcgcgcgagactttcaacattgaggtgccctcgccttcaatgaccaacggcatacaccctttgaagtcgcctacatcgctcaagacacaaagaacgccaagtttcagcagagatgggattctcggctcggcacaaaaggcgcggaatatgtctcactcgtccgagaaccgcccagaggctctggccaatggcatggacaaggcgcccagcgacgaaggttccaacccgctcaagaggcggaacacggacgccggcatcgactacccccggaggagggctacaatcgcgtgcgaagtgtgccggtcccgcaagtcccgctgcgatggaaccaagcccaagtgtaagctctgcaccgagctgggcgccgagtgtgtctacagagagcctggcatcaagctcgacgccggtgacaagttgatcctggagcgtctgaaccgcattgaaagcctgctgcagatgaacatggttgcagggcagggcaacggcatcgccatcaaccaagagtcgccctccatgagcaatggatcggggctcaacggagagagcataatgggagtctcgggttccgggaacatcgtctccgtcatccccaacggcggcctgggcacttggaataacccgaccaacatctcgaccatgcccaagatgcacaccaacgccgctctccacttactgcagtggccactcatccgcgatctcgtctcccgaccttatgatccgcaggtcctgctccagctcgaaatggcgcgcgagcctctgcactcgctcacaaagacaccgtgcgttgacctatcaaacacgaccgcctacatcgaagcctacttcgagcgggtgaacgtatggtacgcctgcgtcaacccctacacctggagaagccattatcgaacggctctctccaacgggttccgcgagggcgcagaaagctgcatcgtcctgctggtcctggccctgggccaagcgagtttgagaggcagcatctcgaggatcgtccccggggaagatgcgcccggcttgcagtacttcaccgccgcatgggcgcttttgccaggcatgatgacgtccaacaacgttctggcggcccagtgtcacttgctggcttcggcctatctgttctatctcgtgcggccgctcgaggcctggaacctcctctgcactacgagcacgaagttgcagctcctactcatgtcaccgaatagggtcccgccaaaccaacgagagctgacggagcggatctactggaactcgctgctgtttgagagcgacctgctggccgagctggatttgccacactcgggcgttgtccagttcgaagagaacgtcggcctgcctggcgggttcgagggtgaggaacaggaagcgattggccgtgacgatctctggtacttcttggctgagattgccttgcggcggcttctcaacagagtcagccagctgatctactcgaaagactcaatggcttccaccaccagcctggagcctgtggtggcggaactcgactttcagctgacgcaatggtatgagagcctgcccatgccgctgcagtttcccttcacccgcaacctgctctccgacccggtgcagacggtgctgcgcctgcggttctttgcttgccgcacaatcatctaccgcccgtacatcttggccgtattggacaacgaacaggcagtcctggaccctgcggtgcgcgacagttgccacaagtgcctggaagcctccatccggcaattagagcacatttctcaacatcatgccggccacatgccctatctgtggcaaggggccctctccatcgtgtcgcagacgctactagtcatgggtgcaaccatgtctccttctctcagcagcatcctcctcacactcgtacctcatcgggaaactatcgaccagattatcaatgacgtggtgatggagattgagcgatattcgaccctggcccctagcctgagcctagcagcagagattatcaaagaggccgaagtgagaaggagggcatacctgagcggatga

SEQ ID NO: 126 - DNA, 2091 bp, Grosmannia clavigera
atgccgacgagcaactcgccaacggtggccacagcagtcacagcggcgactgctcgacattcgtctgccatggacgcttctgacggcggcctatccgtcgacgccggctcaccccagcgctccgtgggcctcggccgtgacggcatcctgtcggcaccatcgtcagacggctcggacgtgaactcgcccagccttgctggcacaatcggagcggcaccaccgtcggccagcagccaggccggtctggtcacggatgccaatccgctgaagcgccgcaatgccgatgcgagcgcagactatccgcggcggcgagccatgattgcctgcgaagtttgccgctcgcgcaagtctcgctgcgacggcaccaaacccaagtgcaagctgtgcaccgagctgggtgcgacatgtatctaccgcgagcccggcatcaagctggatgccggcgacaagatgatcctcgagcggctcggccacattgagaatctactgcagatgaacctggcagatgcaataagctcgtcttccacgcagcagcagcagcagtcaccccgacgggaatcttctgccctcagcacattatggccgtccatagcagcagaaacgagtccgttcgtctcggtagtcccagccagcacaatcgggacgtggagcagcacgaccaacatatcgacgatgcccaaggtgcacaccaacgcggccatgcatctgctgcagtggccgctgatctgcgacttggtgacgcagccatatgacccgcagatcctgctgcggctggagatggcccgcgagtcgcttccatcattggcccagacgccacggatcgacctgtccaacatggccgcctacatcacggcctactttgagcgcgtcaacgtatggtatgcctgcgtgaatccgtacacgtggcacaacctctacggcacggccctggcgaacggacttcgcgagggccccgagagctgcatcgtgctgctcgtcttggccctgggtcaggccggcctaggcggcagcatctcgcgccttgtgccgcgctgcgacccacccggactgtcctacttcaccgcggcctgggcactgctgccggccatgatgacgtccaacagcgtgctggccgcacagtgccacctgctggcggccgtctacttgttctacctggtgcggccgctggaggcgtggaacctgctgtgcaccaccagcacgaagctgcagctgctgctgatggtcccggaccgcgtgccgtcaggccagcgcgagctgaccgagcggatctactggaacgccctgctgtttgagagcgacctgctggctgagctggacctgccgcactcgggcatcgtgcagctggaagagaacgtcggccttccgtgcgggttcgagggtcgagaccctacagacagccagcaagcgacgaccctcgacagcacggctgccggacgcgacgacctgtggtattttctggccgagatcgcgctccggcgtctgctcaatcgggtcagccagttgctatatgcacgggacgcagcggcgtcgccggccagcctgggcccgatcgtggccgagctagactaccagctgacgcagtggtacgacaacctgccagcaccgctgcagttctcgtttgcgagcgtgccgctggccgaccgggtgcagacggtgctgcgccagcgctttttcgcctgtcgcaccatcatctaccggccgtacatcctggcggtgctggaccgcgagcagggccgcgagcaggccgtgatgttggagccggccgtgcgtgcggcctgtcaccactgtctcgaatcggccgtgcgccagctcgagaacgtgacggccaaccaggatggccacatgccgtatctctggcaggccgcgctctccttcacgtcgcaggccctgttggtcatgggcgcgtccatgtcgccgtcgctggccgacatcctgctgtccattgtgccgagccgcgcgatgctcgatcagctcatggccaatgtcgtcgccgagacggcccgctacgccatcctggcgcccagcctcagcctggccgccgacattgtgcgccaggcagaggcccggcgacgagaatacctaggtggttga

SEQ ID NO: 127 - DNA, 1524 bp, Metarhizium acridum
atgagtgcgagccgagacaaagcctacaacccaatggcgaggtcacgccttctatctcagttctcagataaggcgcctgccactcctctccagctggcgaatagcgatggattattgtcttcgctaagaggaaatgaagtgattctactgttgattatcctcggcgcagagcagctattgcttctttttgtcatagatgcttatatgggtttcctttggcggcagtgtgaagtctgccggtccagaaagtcacgttgcgacggcagtaaaccgaaatgcaaactgtgcgccgaattgggcgccgagtgcgtctatcgcgagcctggtgtcaagctggacgctggtgacaagctgattctcgaacaactcaatcgtactgagaatttactgcaaataaacttggtcacgaaccaggccagtggcctccacctgtcacaaagttcaccatcagttagtaacgggactgccagtggcggcgaccaagcccttctgtcaaactcctcaaataccgcctctaccattcccaatggcggtctgggcacatggggtagaaacggctttgtcgaacggctttcgggaaggccccgagagttgtatcgcgctactagtgctagcacttggcaacgcaagcctccgaggaacatgataacgaccaagaatgtcctcgcggcgcaatgtcatttgcttgcggcggcgtatctattttacctggttcggcctctggaggcttggaacttgctttgcacgacgagcaccaagccgcaacttcccctaatggcccctcacaggatttcacaacggcagcgggaactggtggaaagaacatactggaacacgcttttacttgagagcgatgtacttgcagaactggatttaccgcatttcggaatagtgcagttcgagaagaacgttggactgccaggcggttttgagggcgaggagcagggacaggaacagattgggcatgatgatctatggtacttcctcgccgagattgctttgcgaagactccttaaccgagcgaaccagctcatatattccaaagattctgtggcatcaacgacaagtccggaacccgttgtggcagagctggactaccaattaacccagtggtatgaaggcctgccgccttcactgcagtttcctttctctcgcacaatgttgcatgacccgatccaagcggtcctgcgtttacgcttctatgcttgtaaaactattatctatcgcccttatattttggctgtactggaaaacgagcaagcggtcttagacccggcggttcggggttgttgccacaagtgcttggaagcatcagtgcggcagttggaacacattatggagcatcacgctggacagatgtcctatatatggcaagcattggacgaccttatcagtgaagttatcacgggggtgcagaattatgcatccctggcaccaagtttgaggctggcagtcagtatggcccgggtacgggagccacggtttgtgttgtcacaacgccgggccattagccccggacaataa

SEQ ID NO: 128 - DNA, 2049 bp, Metarhizium anisopliae
atgaacacgtctcccgatggtctcaaggtgaaccagaccttgggtgcgggccgagacaaagcccacaacccaatgtcgaggtcacgcctactatttcagcccccagacacggcgcctgctactcctctccagctggcgaatagcgatggattattgtcttcgcttaagaggaaattaagcgattgtaccgtcgattatcctcggcgcagagcaactattgctgtgagtaaacagtctctatgcacgtctgcccgttttgtgtcacaaatgcttactccgtatgtggatttccattgccggcagtgtgaagtctgccggtctagaaagtctcgctgcgacggcagtaaaccaaaatgcaaattatgcgccgaattgggcgccgagtgcgtttatcgcgagcctggtgtcaagttggacgctggtgacaagttgattctcgaacaactcaatcgtattgaaaatttactgcaaatcaacctggccgcgaaccagggcagcggcctccatatgtcacaaagttcatcatcaaccagtaatgggactgccagtggcggcgaccaagcccttctgtcaaactcttcaaatacggcccctaccattcccaatggcggtctgggcacatgggttagtgtccctactggaacaaacatctcaacaatgccaagatgccatacaaacgcaaccatgcacctgcttcaatggcctctcatccgtgacctcgtctctactccgtacgaccctcaaatcctgttgcaactagagatggatcgagaacctctacacacgctaacaaaaacaccatgtgttgacctttcaaacacacaagcatacattcaagcatattttgatagagtcaatatatggtatgcttgtgtcaatccttatacatggcgaagtcaatacagaacggctttgtcgaatggctttcgggaaggccccgagagttgtatcgtgttactggtgctagcacttggcgatgcaagcctccgaggaagtatatcccgtattgtgccgcatcaagagccgccggggttgcaatacttcactgctgcctggtcgctgcttcctggtatgataacgacgaacaatgtcctcgcggcacaatgccatctgcttgctgcggcgtatctattttacctggttcggccccttgaggcttggaacttactttgcacggcgagcaccaagctgcaacttctcctaatggcccctaacagaattccacagaagcagcgagaactggtggaaagaatatactggaatacgcttttgtttgagagcgatttacttgcagaactggatttgccgcactctggagttgtgcagttcgaggagaacgttggactgccaggcggtttcgagggcgaggagcagggacaggcacgaattggccatgatgatctatggtacttcctcgccgagattgctttgcgaagactccttaaccgagcgagccagctcatatattccaaagattctgtgtcatcgacaactagtctggaacccgttgtggcagagctggactaccaattaactcagtggtatgaaggcctgccgcctcccttgcagtttcctttctctcgcacaatgctacatgacccgatccaagcggtcctgcgtttacgcttctatgcttgtaaaactattatctatcgcccctatattttggccgtactggaaaacgagcaagcggtcttggacccggcggttcgcgaatgttgccacaagtgcctggaagcatcagtgcggcagttggagcacgttacggagcatcacgctgggcatatgccctatatatggcaagggactttgtctatgatggcccagacgcttctattaatgggctcatccatgtcgccgtcattgatgggcatacttctcacgattgtacctcatcagaaagcattggacgaccttatcaatgaagttatcatggaggtgcagaattatgcatccctggcaccaagtttgcggctggcggtcgaaattattaaagaggccgagctgtcgaatattacgaacgaagctcgcctgttacggctcgcttga

SEQ ID NO: 129 - DNA, 2034 bp, Neurospora tetrasperma
atgtcgccgtcttccaacagcgactctcccgcttcggtagtgggcagcatgaccatggccgcgcaggctgctcccaacgctgtaaggcaataccctctgccgaatcgggacttcacaatcgaaataccttcgccccaaattgcacccactaccaatggggtcaacaccgtcaagtcaccctccactctcaagtctgcccgtgctcccaacttcagccgggaaggtattcttggatcggcccagaaagcccgaaatctctcgcagtcgtccgaaaaccggcctgacaatgtcaatgtctctaatggctttcaaaaggctcctagtgaagagagcaccaatccgctgaaaagaagaaatacggatgctggtgtcgactaccctagaagaagggcaaccattgcgtgcgaggtatgccgctcgaggaagtcgcggtgtgacggcacaaaaccaaaatgcaagctgtgcacagagttgggtgccgagtgcatatatcgcgagcccggtatcaagctggatgccggcgacaagctcatcctcgaacgcctcaacaggatagaaagtctgctgcaattaaacatgggcctaaccggtcataccaatggcctaggattatcccataactccccggggatgagcaacgggacagggttgagtggtgacaacctgatgatgcaaaatcccgatgccgccggctttgtctcggtgatccccagcggaggcttgggcacatggtctgccaccgctaccaacagcttgtcaacaatgcccaaggtccacaccaatgccgcccttcatttgttgcaatggcccatgatccgggatctcgtctcacgaccttacgacccacaaattctcctccaactcgaaatggccagggagccactccactcgctcacaaagaccccttgtgtggacctctccaacacttccgcctacatcgaagcctattttgatcgtgtcaacgtttggtacgcctgtgtcaacccttatacatggaggagccactatcgtatcgccctctcgaacggtttcagggaaggaccagaaagttgtattgtgcttctcgtcttggctctcggtcaggcaagtttacgggggagcatatccaggatcgtgccacatgaggatcccccgggcctccaatatttcacggccgcatgggccttgctaccgggcatgatgacctccaacagcgttctcgccgcgcaatgccaccttttagctgccgcttacctattctacctcgtccgacccctggaagcatggaaccttctctgcacaacaagtaccaagttgcagctcctccttatgacgccgaaccgggtgcctgtcgaccaaagggaactgagtgaaaggatctactggaatgctctgctgttcgagagcgacctcctcgccgagctggaccttccgcattctggtgttgttgcatttgaagaaaatgttggtctgccatgtggcttcgagggggatgagcaagaggcagttggtcgcgatgatttgtggtatttcctcgccgagatagcacttcggcgactactcaaccgcgtcagccagctcatttactccaaggactccttggcctctacaacgagtctcgaacccatcgtgaccgagttggatttccaactaacgcagtggtacgagagtctacctctaccgctgcaattcccgtttactcggacaatgctcccagatcctgtccagacggtgttgcggttgcgcttctttgcttgccggaccattatttaccggccatacattctcgcagtcctcgacaatgaacaggcaatactggacccctcagtgcgtgacgcgtgcacaaagtgtctggaggcttcaatcagacaattggagcatatcagtgcacatattctggtcagcttggtctcacaccgcgacgttatcgaccagatcatcaacgatgtcgtcatggaaatcgagcgttattccgtactctcacccagtctgagcctctcggcggagattatcaaggaagcggaggttaggcgacgaacgtttctgagtggttga

SEQ ID NO: 130 - DNA, 1809 bp, Mycosphaerella graminicola
atggaccaagacctcgcattcgatgaaattccggactacccacgacgacgagcgatgatagcttgcgagatatgtcgaagccgcaagtccaaatgcgatggatcccggccgaaatgcaagctttgcatcgatctcaacgctgcatgcgtgtatcgcgaaccgggcgtgaaactggatgcaggcgacaaaatcattctggacaggcttgcgaacatcgaagcattgatccagtcgaagtttcctactctatctcaagctgatagctcgacagcgggaccgctagctctacctgccgagcaagggagaactgtcggaaatggccctggatcaatacctcttagcggctttggtatatcgcaggcggcgatgaacatctccaccatgcccaaagctcacaccacgccggctctacatctccttcagtggccgtgcatctgcgacctcgttacaagtccctgcgatccgcaagtccttcttcagctcgaaatgactcgaccaccactcgaccttcgatcccactaccctctcgatctgtccgatctctgctcctccatctatacccgagccttttttggaaaggtcaatgtatggtatgccgtcgtcaatcctcacagctggaacgaactctatcgtacggcttccttgaacagctttcgatccggacccgaaagctgcgtcgttctcctcgttttcgcgctcggccaagcggctcatacagataccagtactgctcatgcctcatatgacggacgtccacctggtactgcctacttcgaagccgcctggcagttgcttcccaccctcatgctccgcaacaacgtgatgagtgcgcaatgccacattcttgcagccgcttatctcctctatctagtgagaccactagaagcatggaacctcctctgctcggtctcgataaaattgcagctcctcctctcctcatcatcacctctgccatccgctgaagcccgaaatttgctcgaacgcatctactggaacactctcatgttcgagtccgacctcctcgctgagctcgatctcccacactccggtatcgtgcagttcgaagagtccatgcctctgcctcgtagctttccgttgactccaatttcgccatctccatcatcctccgctcccgcgccctctcccggcagcgatgaaatctggtacttcctcgccgagatcgcgcttcgacgtctcctcaaccgtgtctcccacttgctctattcgaagtcactttcgctggcctctctcgctcctctagtcaccgaattagaccttcagctgactcagtggcacaaccacctgccaccttcggtacagttcccgatccgtccatcttcttccttgcccgatgaagctctcgaccccgtccaaaccgtccttcgactaaggtatcacgcctgtagaaccatcatccacaggccgtacattctctacgtactgtcttccgctacgccgactgtgggcaattccacttcacacatctctgaagcatgcgccacgggactagaatcagcttacattcaaatatcgctgctgtcctcgcatcgtgctggacatgtgccgtatctctaccaaggttttctgtcgctcgtgtcacagacgttgctgttgcttggagcctcgctgcatacagagctgaggcgactgatgccggtccgaaaagaagcgctggtgaagacggtggacagcgttagaattgaattgaatactttgggacgactggcgccgagtctggaggtcagtggaggaatattgggagatgcggtggacagatggaaggagagaatttcgggcgtcgaatggtga

SEQ ID NO: 131 - DNA, 1845 bp, Trichoderma reesei
cgcccggcagcccgcggcaccgccttctatccgaggaaacgggccaacaccgcctgccaggtctgcagagcccgcaagacaaagtgcgataacaagaagcccgcctgtagttactgcgtcagcgtcggcgccacgtgcattcagtccccggtggatctgtccagcttcgaccccgccagcctgaagatcctcgatcgcattgacgagctggagcgtctgctgcggcatgccgtccccatacccggccccgaggctgccgcgccgccatcgtcggctctcgctccggctccgaccacaggcttctccaaccaccagcggctgcccccactctcgcgatccaggacctttgacggcatcggtggtgcaatgcacgcccctagctcaagtgtcagcagtgtgtcgggtcgcaggcacccggacgacaatatggacatcagccttctgcctcagcgggtagaccacatcctgcagtggccggtcttccagaactccggcagccaccaccactcgccggcctcgtaccgcgcccctcccgatgccatctcgacccctccctccggctcggcatcgctggcgggccttattgatatggattcccaccgcatatacagattactagacaacttctttctgcacattcactgcaagaacccaatcctcgacgaagtcttggcacgccgcatggtaatcaacgcttttctggacggcattgactggtctcccgcctcgtgcctggcgctcatcatatgcgctctcggctgcatcgccacgccctttggccccagcggcgagaccaagctgggcacgcagacctacaacgactctcagatcttctttcaggccgcccagaagcgcatcggcattctgctcgtgcgctccgatattgtcggcgcccagtgtctgtttctatcaggcgtctatctgatgatggtcttccaacccgtctacgcatggcgcttcttctctcaggccctggcagcttgccaacactttcccttcctggctcgggcccagaacctcaacgcctcgctcgactcgatggaaatgggccgccaagatacccaagaacaggccgtgtactggtctgcgtggaagtcggaacgagagctacgacaggagctagaccttcctgatttcgacatcctccattccgggagcaccttgtatccgccctttttccccgcgcctccaattgccccggccgagtctccggacgggccagactccgagacacagcgggctcgcgccgcctggctgttctacctcgccgagatctcgctccgccgtctcaccagccgcctttccagagaagccttagatctccgccagcgctattcctctgactcggtactgctcgacatgctgctggatatgatgcccgagtacgaggctcagatccgcgagtggtcggagagcctgcccgctgacctctccatccatactcccgtggaagaggacggcatatgccggtcggtcctccgaggcaggatgattaatctcttggagcagatttactggccttttgtcatggccagcattagcgctcatgccacaaggcgtcccgtcaagccagctgtggcagagtttgccaaacggggcctggagacacacatgcatcaggtacacgtcaacaagcctggtttccatcatcgacatcatgggagcatgttcatgattcgggcctgcacgcgaagcgccttggttttgctagcagccgccaaagcggggtgtgccatgcccaccgactgggaggattctgtttacaaaaccgtcggcatgctggcctactgggaggacgaggacagagacttgatacactggagatcaaccctggagcgagagctc

SEQ ID NO: 132 - DNA, 1770 bp, Neurospora crassa
atggcccaacaatttccggacaagaagttccagctttcgtataccacgacggcttcatggcttgataccagggaccgagcctggcatgatagcctgttcctatgtgacggtgatacgccatgtgcggcttgtgtcgcaactgaaaacgactgcacttatggatctgaagccaactcgagaggaaagagtgatctcatcctggaaggggtgttgcgtgttgagaagtatcttcacgagttgaatgcaaacattgcagcatcgccacacttcgttagtcgcagttcttctcatcatgtactgtcatccgcggtcggctcgtcagttggtagagggagcttctccggaggctccctaaccgacctgcgcattacacctcgccctaccctctgtccacatccggacgagctagacaacgctaacaacctggagaatgctgttcttgaatcacggcacacttctacaacggagtcgatattacaatggccccatttcgacgtctttcctagtcttcgcaaggactacacttccatcttccaccttgagcagtctcgtcctcgcatcaagacgaagaaaagagacatttatccgtatatgacagaagaagaggtcgacagcattttggatgctttcggccatgccgtcaacttctggtatcctacaacgtcaagcgatcagctacataatgctcgggcactcatcacgaacggaaactttgaagacaacgatgagctctgcgtctgccttgctttactcgtcatggcactgggttgtgcaagcaaggtgacggcaggcttgatggaaagcgctgctgtccctgagagcgaacagagacgcagagcaacttatcgtgcaacgggcgatatgtatttcgagagtgcgctcaagaagctttacgttgcccacatggatgtcagctccatagccacacagtgtcttttcttcgtagctctttacttcgccttccttcgccgtcccctccaagcatgggagtatatttccgccgcagccaccaagtgtctccttctcctttcatactcttcccaagattccacttccgaagatcaagaacgtattcgccgcatcttttggtcctgctacattctcgaatcggattacttagctgagctctccaacttgccgctatcaggtattgctcgtgttgaatcctcagttccgctaccagatgcatggtatagcacgcattcgaacgcccaagaggaggagcagagctctttgtactttttggcctgtatctcgatgaggaggctgctgaatcgagtacatcagctactgtatgctaggggaacaggcgcgagtttggatgataagcggttccctggcattgtgaaggagctggatcatcagttggatgagtggaggactgtgctgccagaagcctttgctttcgaggttgagtggccgccagtcggtgcgaagcacaatatcaccggagtaaagacggagcatggggggttcctgaggcaaaggtatctcacttgtaggagtgtcatctaccggccaatggcaggcgcaatgctcgttctcttggccgcctgccggatatctttgctcaaagacctcatcgggcccgagatccttcaagcgggaagccacttgagggaattgttggtaggatggcagaaagtgcaaggagatccgagctcgcccagcgtgaatcaaagtatacatattatcaaggaggctgagaggttcatcagacaggtctataagggtggaaaggatgaagagcaaggccgcattgaggagtaa

SEQ ID NO: 133 - DNA, 2439 bp, Neurospora crassa; identical to SEQ ID NO: 5

SEQ ID NO: 134 - DNA, 2199 bp, Aspergillus terreus
atgtttcacacttttgacggcagcgaaagcgcttcgcgggcggccccaggccgacaggggcccggcggagaacgaggtgagacgaccggccggcgagtgacgaccgcgcgggcgtgtacctcctgtcgccatcgcaagatcaagtgcgacggcgagaggccgtgtgaggcctgtcgctggtacagaaaggccgaccagtgccactatgcacacccgcggacatcagacagtaaacgggtcaaggaagtgtccgccacccttgacacataccgacgggttctgggcacgctgttccccaacgtcaacgtcgagtcgctggataacctgcctcgcgagaagctgctcgaagtcctcgccgctcagtcgcagcagtcgccgggcagtataccgcagcccagctcctcgccaacggccaccctggcatccgtagcgacacatggcgactcgaccgaggatgacaacctggagctcttgcaaaccatgcccgccgagcccctcgaccggcaacatactggctctaccgatcccgaccaaggcctctcggacgatgtcaacggcctggccttgtgtgctcgacagccctcgtcgtatctcggcatctcgtcgacccaggctgtcctgaaagtcatcgtgttgttaaacccgggctgcgcctcgtacttgtcgcgaaagcccaccagtgctggcgaggggacggcgtatggagcgccatcgggctggctgccacatgcgccggtggccccgttgcagccgcagcatctcccgctcaccgagatgcagttcctcgatgcctatttcctcatcttccatgcattctgtcccatgatcgacgagaagtccttccgcgagacgtacctcgccggccaccgccgggacaaaccctggctggccctgttgaatatcgtgctggccctgggcagcgtcgcggcgacgaacccaaacgacacgacgcatcagatctactaccagcgctgcgaggagaacctgggtctgagcgccttgggcaacccgcagatcgagatcatccagacgctgggtctgatcagcggctggtactgccactacctcagtcagcccgaactcgcccagtcgctcatgggcgccgccctgcgaatggcaaccgcccggggcctccacaaggaaccgatcaagcacgaccaggtgctggacccggcgacggcggcgtccctggatatcaagcgccgcacctggtggtcgctgttctgcatggacacctgggccggtatgactctcggtcggccgagcatgggtcggactggtttgactatcacggtcaagcctccccacggccgggacgaggaaacacttatggacgttctcccgctggtggagaacattcgctttgcgcggatcgccaccgagatccaggaactcctcgcagccgcgccgctgggcaagcaccaggccgcacagatggacgcgcagctgctggaatggtgggagaacctgccggcgattctgaaagactacgagccgtgcccggagcgcatcaagacggtccgcaacgtcatgcgctggcgctactacaaccagcgcatcctgctgtaccgccccacgctgctgagctacgcgatgcggcgcgtgtcgtacctggccctgcgcaccgaggagcgcaccgccatcgagaagtgccgcgagatggccgagctctccatccagcacatcgccgccaccgcgcagacgaaccagctcggcggctggaacgccgtctggtggaccttcctggcctcgatggtgcccctgctggggctcttcatcaacgacccgaccgccaccgacccgcgcgcctccatccgctcctgtcaggcccaggtcgagaccgccatgctcaccttcgcccgcatgcacgccctcggccataccgccaagacctccctcgacgccgtgtcgcgcatcttcgaggcgagcaagcacgtcgataacctcgccgtgcatggcgccgccctgccggttcttgccccggcggtggattccgtgcgcagggatgcgactgcgctgggggtgatgccgcagccagagatgaatagggcgatgacgagccacagcgaggcggcccacttggatgccctcatctacccgtttgtccacgatgccaatgaccagcagatgtgggactatctcagctggggggataatagtatgtggcctggacttgttacggatatagcgatggcatag

SEQ ID NO: 135 - DNA, 2334 bp, Aspergillus terreus
atgttccatacattcgaagggttcgaaaatccggcgggctcgaccgtctctcggggccgtaatgaacgccagcagtcagtcggtcggcgagtcaccaccttgagagcctgcacttcttgccgacatcgcaagatcaagtgcgatggtgagaaaccatgtgaagcatgcagatggtacaagaaggcagaactctgtcattactcggaccctcgtccttctcgccgacatgtagaaaaattgtccaccacgttggacgaatatcgaggcgtgctggagaagctcttcccgaacatgtcgcccgaggcgctattcaacctaccccgtgagaagttgctggagatgaccaccacaggcgcaacagcccatggccaagtccagggagcgcatccagcttcgcctgccacctccgcctcggtagaggctcatgtctcgcccatgtccaacgaggatacgaatctcgagtctcttcaaaccatgccggatgagtccagtgaggccaggaactcagccaacagcgaagccaccaatggcatctccgatgatgtcaacggactgtcgctgtcggcacggcagccctcctcctatctcggagtgtcctccatcaacgcagtcctcaaggttatcgtctggctggacccgggctcagtaacctatttctcccgcactcctgccatgggcgctcgacgagggtctatcgtggacctttcagccccggaagcacagaactggccggtccaggccgggcagcagcaacagccggttactcccccgcaacaggtaccagtcacggacgtgcagatgctggatgcgtactttacatatattcaaccattcattcctatgttggacgaacagtccttccgggaaacctacatgtctggccagcggaaagatgatcaatggcttgccttgttgaacgtcgtatttgccatgggcagcatcgcggcctgtccctcggatgatacgacccaccaaacgtactaccaacgcgctaagggctatttgaatctggagtgtcttggctcgtcgcatctggagacgattcaggcgttgggtctcctgggcggatattatctgcactacgtcagccagcccaatttggcgtattcgctcatgggcgcagctctccgcatggcggcggccctgggcctgcacaaggagttcaccgaaggccaggatgcaaataacaagcagaaagtgtcgtccatggacctcaaacgccgcatctggtggtctttgttttgtctcgatacttggggtggcatgacgctgggccgacccagcatgggacgcttcgggcccaccatcaccgtgaaactgccccatcatcgggagaatgggaatgtattggacatccttcccctcttggagaatgtccggttctgcaagattgcgacccagatccaagaggtcctagcggtcactcctctcaccagatatcaggacattacccacttcgacaaccagctcttggactggtatgaaaaccttccatacatcctcaaagaccatcaaccatgctcggagtcgattacgatcgcgcggacggtaatgaagtggcgatacgccaatcaacgcatgcttctctaccgcccaacgctgctgagctacgctctccggcgcgtaccatacatcgccctccgctccgaagagcgaactgcgatcgagcgatgcagagagattgcagaggaggccattcaggacatctcgtccacggcacagtcccaccagatgtcaggctggaacgccgtgtggctgattttccaggcggtgatggtccctctgctggggctgtaccttaacgacagcaccaacaacgacccgcgcgcaaccgtcgagtcgtgtcaggcgcaggtcgaaacggcgatgctcgtgctggcgcgacttcagccgtggagccccacggcgagacgcaccctcgacgccgtttcccgcatcctcgaggccagtaaacgcggccccgaccccatgatcaacgacgccggcaatatgcccaatggcaatccatgtcccacctcggtgcctggggcggcacccagcatcctcctctcccagcatgagcttcctcgcggaatgaacctggacagcgggttcgcagattccatggcgccggcctttatggacgattctgctggccagcatctgtgggacttcctcagctggagcgacaacagcctgtggcctggagtgacggagctggacggcaccgtggaggatattttgatgatgcccgacgacaagggcgcgaaatttggcaacgggccctcggcgttcttcggcaacccgatgggcgagccaacctactatgccaacacggcgctgccgttttattag

SEQ ID NO: 136 - DNA, 1896 bp, Aspergillus terreus
atggaggtagcccgtgcacaagttttgcatggtgctgcttcatacagtgccttaaacaaagctaccgagacagtccgtcggcaggcggcggttcttcaagtgctgtttcctcacgtcactttggatgatctggtggacaaggaccgagctgagctcatccgtcttctatcgcaatcttcctcaacaaacgcagatctaccagcagaaagattcgtcgtggcgtcatccgtgtccgacagcccagaaaacgatcccagtgcattggaggagtcagatgaagcagatgattcggaggaccggcattgggacgagtcagcaaaagaccctgcaactctggcaaccagcgacgatatcaacgccattgggctggcgggcgaccgacgccgccggtcatatctggggatttgctcggtaggtgcggttctcaaagcattattccggctttgtccaggcgcaaaagagtgcatcatagaagactccaagctctgggcccccgtccaaccggacgacactcgccctgcactcctaccccaaggccttgccatgactccattattggactcactgagagaattgcgctatatcacattctactttgacaacgttcacgcaatcacgcctttcttgcatgaggagtcgttcagagcaaaattcacgattagagatcaacaaggctcctcatggttgggtctctgcaacatggtcctcacggtgggatccatcgcttctggcagtgatacagctcacatccactactataaccaggctcgctcgtacctcgatctagattcattgggttctggtaacttggagacgttacaggcgctgtgcttacttggcgggtactatctgcattaccgaaactccccaaacatggcatattcaatcctgggcgccgctcagcgcttggccatagcgttgggcttacaccgagagccgcccactcgaaacgaacagcctaaccctgagacacgcggatcctatgcgcttcggctcgagactcggcgtcgcacttggtggagtctttactgtctcgatacctgggcgagtatgacgctaggccgaccgacttgcggccgatgggatacagccactatgaatacatcgttgccctgcaccctccattcagaggaccatttcgctacgtccttaagggccagcgtcgagttctgccacatctgtaaccgtctccaacatcgcttcgcccaatttatccggatcagcgtccatgaagcccaggccttggactacgatcttcagcggtggtatgacggccttcatccagtcctgcagcatacaacagacgctccgccgcgaatgagtgtcgcgcgcgaattcctacgcaacagatactacaacgcgcgattgatcctgtcgcgctgtttcttgctctacatggcctatgaggatactaaaaggcgccatcctcactcagcggagcagcagatggcgggcatgtgtcgttccattgctggagagaccatcgatgcaatcgcactccactgggtccccaatcgcacacaggtctggaatgctgcctggtatctcttccaagcctgcatggtgccgctgctatccatagccatggctaatacgtccgatcacgctgcagttgaccctgcggacgtctcggcctggtacgccagcttgcacaaggcccttgaagccttctcagagatgaggccatggatgcgggcatcggatcgcgccccaaacatcgttgctgttctgctccgagccgtgtcgcagggacccgacggatctatacacacaccatccgtgacggatggcgcattgaatctctttgggatgtctgatgagtttctcatcgaaatggactggagcgagcttcccaatgacgagaatatgttccaaagtctgtttccattgacatga

SEQ ID NO: 137 - DNA, 2394 bp, Chaetomium globosum
atggcaccaaccatcccagtgcccacacagggcggcatgttccacaccttccaaggcgtcacaccacgcaaagcatcaacagattcccaagacagcaccaagaccagcggatcggggaccgctaagaggataaccacaccacacgcctgtgccgagtgcaagagacgcaagattagggcacccaagatgtgcttttatgacaagcaccggcagcgggtgattccctcacgcaagaccctcgaagccctctcacagtcactcgaagaatgccgctccatcctgaagcggttgtatcccaaccaggaggtccaggctttgctgcccctatcacgacaggagctgcttaacctcctggaccggcccgtaatagacacctcggtcggcggtctcccatcaccgcccatcaacacctcgcccatctcggacatcggctcgccaatgatgaccaagtcggaaaacatcctggagcagcttccgtcgagagacaccgaatgggacgaggaacggagggggagagacccaatccccgccgaggctgacgacatcaacgctctctcgctctccgtggaccggcaagcatcctacctcggcgcctcctccatcaaggctgccttgatggtcatgctcaaggtgcagcccagcttgaggaacaccctcgccgcgcctctgagcggcgtcgagatgtcacacaacttccccgccgtgaggcaaaagtcttcggccgcgccaaaagaccctcagcggattccgtggtcctggaagggccaaaccttgatcgacgcctacttcaagcgcatccacgtcttcgtccccatgcttgacgaaagcgccttccgggccgactatcttgaaggacagcgaaccgacgctccctggctggcactactcaacatggtgtttgccatgggaagcatcgctgccatgaaatccgatgactacaaccacatcaactactacaaccgcgccatggagcacttgcccatggacgcctttggcagcagccacatcgagatggttcaagccctcgccctcatcggcggctactacctacactacattaaccgccctaacatggctaacgccgtcctcggcgccgccattcgcatggccagcgctctcggcctgcaccgcgagtctctcgcccagtccagcagcgacatcatcgcggccgagactcgccggcgcacttggtggtctctcttctgcctcgacacgtgggcgaccactaccatgggtcgcccctccttcggccgctggggaccggccatcaacatccggccgcccgagtttggcatcaacgccaaccgtgactcgtcgcagcacgccggcatcctaccgctgatcgagaacatcaagttctgcaagatcgcgacccagattcaagatatgctcgccatcacaccgctcctcaacaccgaagaccgctgcaacctcgactcgcagctcgtcgcctggtacacgtcactgccctggctgctgcgcaccacagacccctgcgcggagccgctctacatggcccgctgcatcatgaagtggcgctaccagaacctacgcatgctgctgcaccgaccggtgctgctctcgctcgcctcgtcgggcttgaacccgcacacacaggcttgcgacgccgacctggccgccatcgagacgtgccgcgacctcgccgcgcagactatcgatgatatcgcgcgcgagtgggcgcggaaccagatgagcggctggaacgcggtctggtttctgtaccaagccgccatggtgccgctcgtcagcgtcttctggcagtgggggtcgccgcgcgtgcccgagtggctcaagcagatcgaggccgtcctggacctgctcgaggtcatggaggagtggtcgctagccgctcgccgatcgcgcgaggtcgtctggcgtatgtacgaggctgcccgccagctcgtcgcccagcagcgcgccagcgccagcccttccatccaggtgctcacgggcggcggcgccgctggcgctgaaggtatgctgatggccagcccgggctccgccgaagctgccggtatgcacatgagccccatcggcctcgagcccgtcgatggccttggcctcatgggcctcctcgatcagggcggcctgtggggagacctcgacggcatgtactggggcagccagcacagccattccgggagcatgagcctgggtagccccgtcgacgagtcggccatggccgccgccgccgctcacgagtttgccgctgccgcggcttaccacccgggtgcgcctactactgccggcccgcacgagggcatggtgcacgccgttgactacggcggcctcatgggccatcacgcacacccccatcacggaggccaccaccatcaccaggcggccgcaatggagtttggatacgtccaataa

SEQ ID NO: 138 - DNA, 2274 bp, Coccidioides immitis
atgttccatattttcgaaggattcgagaatcccgataaggcccggagtcaccgcgagggccgtggcaagagcggaaaaagatcctcgacggtgcgtgcctgcgaacaatgtcgacgccgcaagattcgctgcgatggagagcagccgtgcgaggcgtgccagtggtataaaaagactgatctgtgtcattactcggatcctcgcccgtccagaaggcatgtcgaaaagctatcttccaccgtcgaggagtatcgagtcgtgtttgagaaactctttccgtccatccctttgcaatctctctccaacctcccccgcgaacgccttctagagctggcctcgagaacccaaccgcagtccgaaattcttcctgttcccgtgtccaagcccccaccgtctgtcgataaccatgtcctccctctccccccagaagatgaaaacctagaatccctccagacaatgcccgatgattccaccgagagtcgtacatgccggagcccagatctcgtcgccgctgtgtccgacgatgtcaacgcgttgtccttatcaacaaaacggccctcaacatacttggggatatcttcggtgaatgctgttatgcgggtaataatgtggattgatcccgagagctcccagcatttctccagagctcccgatccgcaacccttcgcgaaacgggagaaacaacctctcccggataactgctcttggtccttgcagcccccaccttccacggctgggcatctggaagtaaatcccatggagcttaccaacgcgtactttgcatacttccactccttcgctccattgctggatgagcacttattccgcgaaactgtcctggttcgtaaaaggtccgatccgcgttggctagcactccaaaatattgtttttgcacttggaagtattgctgcatacacggccgatgatacatcccacgagtcctactatctaaaagctagacactatttgagtttggatacccttgggaatccgcatttagagaccatccagacccttgccttaatgggaggccattacttacattatatgagccaacccaaccttgcacattctcttatggcagttgctctgcgtatggccactgttctaggtctgcataaagaattcattggaaatcaggaagctgctagccaaaacagccaaagaaaattctctgtcgatttacgaagaaggatctggtggtctctcttctgccttgacacttggggctatatgacgttgggtagaccaagtatgggacggtggggccctggaattacagccaaactcccacataaccacggaaacaaggtgggagacgctcttgcagcttctccgattgtcagctatcaagaaatggtcagtctcgataatcagttggtcgaatggtatgacaatcttcctccgctcctaaaggatcatgaacccagtgcagatccggtttctacaacgcgaaccgtgatgcgatggcggtatcaaagccagcgtattcttcttcatcgtcctgtcttgctaagctacgcgatgcgtcgtatcccctatgttgcactcagaacagaagagagatatgctattgaaagatgcaggatggtcgctaatgaaacaattcgggatgtcgcttcaactactcgcttgaaccaaatgacaggatggaatgctgtttggctcctcttccaagccacactagttccgctccttgggctttttattgctgatggaaccgccacccatgcgcacgcaacgtcggatagctgcagaaaccaagttgaaacggcgattgttgcccttgagcgcttggagaactggagtccaactgccaagagaacgttggaggtagtctctcgaatcctagaaactagccagcgaccacgccacaccagcgccggcagctgtacatctggaagcgacacccacacagccggcatgagtgatcagtctgccaccgcttcatcggaaacatcaaacaccgcgccttctattcacactatggaccaaacagccgtccttagcaatgctgcgttccctagttaccagaatattgcaccatatatacagccctcaccgcagcaaatgttggattatattacatggggggataataacatctggtcgagcgtccaagaggatttttatactcaacaaccccccgctgtggggatgtttggccagggtcaacagtatcttaagcctcttgatcatgaacctcccgcggctggagaaagggttggagtgtatgataccggattagagaccccgaatattgtacggttttag

SEQ ID NO: 139 - DNA, 2106 bp, Neosartorya fischeri
atgttccacacctttgaactccgccacagcaacccgcgcacagcgactggagaacaacggcgaggaagacgaccaggattacgagcctgcaaggaatgtcgtcgacgcaagatccgctgcaccgggacgcatccttgtgagccgtgtctgtactacaaaaagccggagctgtgccgctattcggatcccagagtgccacacagcgggacgcgagaccatggttcccatcccgatagtcagtaccggtctgttttggagagattgtttccttcagtctcgttgcagtcgctcgcgtctctgacgcgcgaggagctcctggatctgttgcgagatagtatacttggctcggatcggccccctccgcagcctcctgagcgtccgggggaggagcactcacgatcgtctttggaggcgatttcaatgggaaacgctgatactggtgaagttaatgctgtcaatgacaaggatgatgtatcggatgatgtcaacgcgctctccatggcaacgcgtccgccgtccacctacctgggcatctcttccatcaatgccgtcctcaaggtgatcagctgggtcaatccggaatcaatggctcgaccgttcactacaactccatcgagaaacaggcctagagtgaaaacgcgagctcccgtaaccccatcaaccgagtcccaagcccgcgaccaactcatcgacgcctacttcaacttcatccatccctccatgccgctcctcgacgaaaccgacttccgacagacctacgtatccaacaccaggcgcgacgagcactggctcgccctcatgaacatggtcctcgccctaggcagcatctccctctaccccagcgatgacaccacgcacatcacgtactgcaagcgcgcgcgccaacacctctccctcgaatccctcggcagcgcacacatcgagaccgtccagaccctcggcatcatggccggccactacctgcactacatcagccagccaaacctggcgtacgtgctcatcggggccgcggtacggatggccaccgcgctgggtctacacaaggagaccgcagacacagacgcgagcgagagcagaccgctccagtcatcgtctgtgcccgtcgacctgcgccggcgcatctggtggtcgctctactgcctcgatacatggggttgcatgaccctcggacggccaacgctaggccgctcatcgacggccgtctcgacgaagccgccagcgaacacatcaaccaccctcatcctcctcgaaaacatccgcttttgccaaatcgccacccgcgcccaggaagccctcgccgcatcccctctcccgccctacgcccaactccaagatctcgacaccgagctgacaaactggtacgcgcagctcccaccgctcctgaaaacgtacgaaccatgcccggactcggtccatacagcccgcaccatcatgcgctggagtctgcataacctgcgcatcctcctctaccgcccgttcctgctacggtatgccctccgccgcgtccctgccatcacgctccacaccgaagagcgcctcgcgattgagaagtgccaggtcctcgcgcgccaggcgatacgcgatattgctgagacgcaggtgaagagccccccggctgcgtggggggttatctggcatgggttccaggcgagcctggtgccgctgctgatgttgagtattcttgccgcggaggctgaaaacgatgtggacatagagatggtggagtcgtgcagggagcagcttgaggtcgccatggctgctattgcgcgcgtcgaggcgtggcagccgactgcgcggccgagtctggatcttattgcggggatttttcgggcgtcgttggcgaggttggggttgatggcagcgtcgggggcctcatcggatgggacgtctcctgttgccccggggcgggtatatccggttgatttgcagcccagggtccaggtcccgcagaccgttccgatggcgtatacggggaatgagctgggcgtgtcgagtcaggatgtttgggattatattagttgggtgagtcccacggcgtggactgatgtgcaggggcaggcgagtacgatggatctgtggtccacgccggggtggtggcagctttga

SEQ ID NO: 140 - DNA, 2319 bp, Neosartorya fischeri
atgtttcacacctttgagggttttgaaaaccctggtgcctcaactccggctaagggtcgggagcgccagcagtccgttgggcggagagtcaccacccttcgggcctgcacctcatgccggcatcggaagatcaaatgcgatggtgagaaaccatgcgaggcgtgtagatggtacaagaaggccgatcagtgccattattcagatccgcgtccttcccgaaggcatgtggaaaaactgtcgaccactctagacgagtatcggagtgttctggagaagttatttcccagcacctcccccgaggcccttgtcagtctaccccgtgagaagctcctggagctgtcgggtaagggcccgtcgcaggcgcatgcacaacatccggcttctcctgccacctctgtgtcagttgaagcgcacgtttcccccatatccaacgaagatggcaacttggaatcattgcagacgatgccagaagatccaagcgacagccgaaaccagagcaccagtgatattacgaatggaatttcggacgatgtaaatgctctatctctctcagctaaacagccttcctcatacctaggcgtgtcatctatacacgctgtcctgaaagtcatcgtctggcttgatccaggatctctctcttatttctctcggacgccggcgagcgctgctccccaagagtcaatgcatgattactcaacagcagccgagcatcagaattggcacatccaatcgtctcagccgcatccggttacaccaccccaggctcatatgcaagcgaccgatatgcagctgctcgacgcatacttcacctggttccagccgtttgtgcccatgctggacgaacaagcttttcgcgagacatacctgtctggacaccgcagagacgaccgctggctcggacttgtaaacattgtcttcgccttgggaagcatagcagcatgcccgtccgatgacatatctcacaagatttattaccagcgcgctaaaagctatctaagcctggattcattaggatcctcgcacctggaaactatccagactttggggttgatgggcggttattatctacactatgtcagtgagccgaatctggcttactcactcatgggagctgcgctccgcatggcggccgccttgggtttgcacaaggagttctcctacagtcaggatgcgtccggcaagcagaaaatttcagcgatggatctgaaacgccgtacatggtggtcgttgttctgtatggatacatggggtggaatgactctgggtcgacccagcatgggtcgtcttggtcccaccattacagtgaagctaccaaatcacagagaaaccggaaacgttctcgatatcctccccctgcttgaaaacatccggttctgcaagattgctacccagatacaagaggttctggctgtcgcaccgttgacgaaacatgccgagatgtcccaactggacagtcagctgttggaatggtacgaaaacctgccctccatcctcaaagaccatgaaccatgctccgaatcgatttcgaacacgcgaaccgtcatgcgatggcggtattataaccagcgcatgctcctctaccggccgaccctgttgagctatgctatgcggcgagttccctacattgcgttgagggcggaggaaaggaccgctattgagaaatgcagagaaatggccgacaccaccattcaagatatctcctcgacggcccagtcgcatcaaatgtccggctggaacgctacctggctcatctaccaggcaacaatggttcctcttctgggtctgttcctcaacgacgccacagcgagtgatcccagagcgtctgtccagtcgtgccagtcgcaggttgagacggcgatgatggtattggcacggatgcagctctcgagtcccacggcgaagcggacgctggaggccgtctcgagaatactcgaagccagcaaacgaggttctgatatgggaggcgcagcgagcggtctcgccagtggaagctgcgctcaggggcgcgaaagcaacatgtcgggaatgatgcctggagtagtctcagcactgaccgaacccggccgcggtgttgcgattgcgaatgacggtggaatggtagatccgatggcaccgccattcatggacgagacgaccggccagcaactttgggacttcctcagctggagcgattcaaccatcttgtctggattctcagagattgagaacccgaacgacatgaagtgcggcggcaatgcacctggcttctatagtcctatgaccgattcaacatattacatgcatccatccgtgccgttttactcgcttgctcaaccataa

SEQ ID NO: 141 - DNA, 2148 bp, Aspergillus clavatus
atgttccatacttttgagatccaccgcaacgagcagcgcacagcacgagatgaacgccgtggtcgtcgaccgggcctacgcgcctgcaaggagtgtcgacgacgcaagatccgctgcactggcactcatccatgcgagccgtgtctctattacaagaagccggagttgtgtcgatattcggatccccgggtgcctcgcagaacgctggacgacagcatcgacacagccaatcagtaccggtcggtggtggaacaattattcccgtccgctcccgtgcagtcactggtgtcgttgtcgcgagaggagctgctggcgctgttgcgcgacagcatcctggtgtcagatggacccacaccgcagcttcctgagacccccggaacggaccagaattctcatccctcgcaagacgattcgctggagaacacggacggcaacgagtcgaacgacgtctcggacgatgtcaatgcgctctccaccgtcactcgcgccccgtccacctatctgggcatctcctccatcaacgccgtgttccaggtgctcaaatggatcgatcctgagtcgctggagctggccgcggcggtcgaggagactccctcgccgggcccggcgggagggagatccccttcgctcaccaaactgaccaactcggtcattccgcaatctcattccactcaatcaaacaacgatctccaactccttgatgcctacttcgactacatccacccttctatgcctctcgtcgacgaacgagacttccggcaaacgtatctcgccggcactcggcaggacgaccaatggcttgccctgctgaacatggttcttgccctgggtagcatcgccctctaccccggtgacgacccctcgcacatagtctattgcaagcgggttcgctcctatctctcgcttgagtcattgggtactgcacatctcgagaccgtgcagaccctcggtctcatggccggccattacctgcattacatcagccagccgaacctggcgtatgtgctgattggcgccgccgtgcggatggccacggcgctggggctgcacaaggaaaacgccgacatcgacgagagcgaaagccggcccttacggccgtccgtgcccgtcgagctgcgtcgccgtatctggtggtcgctgtattgtctggacacctggggcagcatgacgctggggcggccaacattgggccgttcgtcgctggcagtgacgacgcggccgcccgtccagaccgtgggaatcaactcctcgtgtacgctcattctggtcgaaaacatccgctactgccagatcgccacccgcatccaagaggctctcgccgcatcgcccctgatcccctactcacaactccaagacttcgacaacgagctcctcgactggtacgagcagctgccggcgctcctgaagtcctacgagccctgctcggactcgatctataccgcgcgcacccgcatgcagtggagtctgcacaacctgcgcattctgctctaccggccggtgctgctgagcttcgcgctccgccgcgtcccctacgtagccctgcacaccgagcagcggctcgccatcgacaagtgccgcatgctcgccaacgatgcgatccgcgacatcgcgcaggcccgcatccacaaccccactgccgcctggggcgtcatctggcatctgttccaggccacgctcgtcccgctactcagcctgagcgtcgtgctcaccaacacggcgcccatcaccgacgcagaccgcgagctggtcctttcgtgccgcgagcaggtcgagattaccatcggcacgatctcgcgcatcgaggcctggcaccccaccgcccgcaagagcctgagcctcatctcgcgtatcctcgccgcaaccaaagtccgcttcgccgaccctccgccaccaatctaccacccccaaacacaacctcccaaccaacctcaatcccaatcccaaccgcattcccaggccatgaacccggccctccaggtccccgtcatgaccggcatgccctccatctacaccgagaacgagctgagtctgcccagccaggaggtctgggactacatcagctggacgggccaccgggcgtggccggatacgctggcgtcgcaggtgccgaatccggatttctggtccgcgccgggctggtggcaatga

SEQ ID NO: 142 - DNA, 2346 bp, Aspergillus clavatus
atgttccacacctttgagggtttcgagaaccccggtgcttcggcccagacgaagcctcggggagagcgccagccatctgttagccggagagtcactaccctccgtgcctgcacgtcatgtcggcaccgcaagatcaaatgcgatggcgagaagccttgcgaggcttgtcgctggtacaagaaggccgatcagtgccattattcggatcctcgaccatctcggaggcatgtggaaaaactatccaccacgttggatgaatatcgaagcattctggagagactctttcccagcacttccccagaggttcttgtcagtctatcccgggaaaagctgctcgagctctcgggtaagggtccatcgcagcagcaggcacatcatcctgcttctccagctacatcctcatcagtcgaagcacacgtgtcgcccatttccgaagaagatggcaacctggagtcgctgcagacgatgcccgaggaatccaacgacagtcgtaaccgaagcagtgacgacattacgaacgctatctcagacgatgttaatgccctctccctgtccgctcgacaaccctcctcctatctaggcgtatcatcgatccacgccgtcccgaaggttatcgtttggcttgacccaggctctctctcctacttttcccgaactccaccggtcgctcctcgtcgagattcggttcgcgactacccagccggatcggaggaccaaaactggcacatccaatcctcgcagcagcacccgatcacacctccgcaaactcagatgcaagtaactgaagtgcagctactcgacgcctacttcacatggttccaaccgtttgtacccatgctggatgaacaggtattccgcgaaacgtacctctcagggtgcaggcgagatgaccgctggctgggattgttgaacattgtattcgccctcggcagcatagcagcctgcagttctgatgacatgtctcatgcactttattatcagcgtgcgaagagctacttgaacctggactcattgggctcgtcccatctagagacgattcagactttaggcctggctggaggctattatctacactacacaagtcaaccgaacctggcttactcgctcatgggagccgccctccgcatggcagccgctctgggtttgcacaaggagttctcagacagccctgatggctccaacaaagagaagatcctggccatggacatgaaacgccggacatggtggtcgctgttctgcatggacacatggggcggtatgacccttggtcggcccagcatgggccgtctgggaccgaccattaccgtcaagctgcccaatcaccgggaaagcggaaacgtcctggatattctccccctcctcgaaaacgtgcgattctgcaagattgcgacccagatacaagaagtactagcggtcgcacccttgacgaagcatgccgaaatggcccatctcgacagtctgctgttggaatggtatgggaacctgccttcgatcctcaaggaccacgagccctgctctgaatcgatcatgaacacgcggaccgtcatgcgatggcgatattataaccagcgtatgcttctgtaccggccgaccctgttaagctacgcgatgcggcgggtcccaaacattgctctgcgatcggaagagagaaccgccattgagcgatgcagggagatcgctgaagccacgatccaagatatctcctcgacggtccggtcacatcagatgtccggctggaacgccgtctggctcgtcttccaagccaccatggtcccacttctaggattgttcctcaatgaccctacggccagtgaccctcgcgcctcattccagtcctgtcagtcgcaggtggaaaccgcgatgcttctactggcgcggttgcagccctggagtcggacagcgaagcgcacgctcgaggccgtctcacgcattctcgaggccagtaagcgaggatccgacatgggaggcgccccgaacggcgtatccggtggaaacttgcccgatcgcgaaagcctcgtgtcagggatgatgccaggaaatgccttagctcagacggactccggtcggagcgttggtatcgccaacgacggttcaatgatggaccccatggcggcattcatggacgactcggccggccagcaactctgggacttcctcagctggagcgactccaccatttggcccgggtttgcggaggcagacaacgcgaacgagatgtcgtttgcgcaggacgagaagaacgcaaagtacggcagcaacgcaccgggtttcttcggcagtccaatgaccgactcgacatattatatgaactcatccgtaccattttactcgcatgctcaaccttga

SEQ ID NO: 143 - DNA, 3031 bp, Aspergillus niger
attcccagcgtcaacgctgccgatgatcatcaaaccccgaggcttgcctgctcacttccccaaaacaggagctgagttcccgcgtggatatattgtgtttttcttcctctttacaatcttcgtttgatgggcctttctttgcttttcgtctacttcatacctcattgtttccccggacaatgaccactgcagcgactaactgattacctgcataactaactgacttggactactttgcccggtctattcgatccacttgctattttccccctcctgacaaacaaagatccctgctctctggtgcatctaacctactggtttccctgcgactcggtgtcaatggccccttcgagttaatctcgccacccctaaagtgtctcaacgggtacacttcccgactatccgtcaaacaaaaactccagcaaactatcccccgatcgcaacgcaatgtttcacacgtttgaagggttcgagaacccaactcttccggctgctgtgcgcggacgcaatcaacgtcaacaatctgtcggtcgccgagtcacgacgctccgcgcctgcacatcttgtcggcaccgaaaaataaagtgtgatggtgaaaagccatgtgaagcatgcagatggtataaaaaagcagacttgtgtcagtactctgatcctcggccatctcgcaggcatgtggagaaactgtcgaccacactcgatgaattcaggggagtgcttgacaagctcttccctggcattccagcggagaccctggtcaacttgcctcgggacaagcttctggagctgacaggcaaggggccttcccagatgcagacgcaagcgccacacccggcatccccagcaacctcggcatcggtagaggctcacgcatcgccagcatccagcgaagacggcaatctcgagtctctacagacaatacctgatcacacaactgatgatcgtgaattgaaaggttctgagctaacgagtaccgtatccgacgacgttaacgctttatctctctcggccaaacagccatcttcctatttgggtgtctcttccatccatgctgtgctaaaggtaatagtatggctggagccgagctctctctctcatttgtctcgcgcacccgccacaggagtccgtcgagaatctgtcatggacattgcatctccagaggcccaggcctggcaggtttttgggtcacagccccatcatggcacgtccacccatagcccactccaggttcccgagactcaactgctcgatgcttacttcacctacttccaaccttttgttccaatgctggacgaacaatattttcgccaaacgtatctttctgcgcgcaggaaagacaagcaatggctcgcgttacttaacattgtctttgctttgggcagcatagcagccaccccggccgacgacatgtcccatcaagcatattatatgcggtctatgagccatttgaatttggaaagccttggatcaccacacgtggagactatccaagctctgggcctcatgggtggctattaccttcactatagcagccaacccaacctcgcgtactccatgatgggagccgcgttgcgcatggcggctgctctggggctacataaggaagtgtcagatggccagtatggcaatggcaggaataggctatcttcagttgaccataaacgtcgggtatggtggtctcttttctgtctggacacgtggggtggcatgaccttgggacggccaagcatgggtcggctgggtccagcaatcaccgttaagctaccacattacagagaaacaggcaatgtgctcgaccttctaccacttttggaaaatgttcgcttttgcaagatcgcgacacagatacaggaggtcctggccgtggcaccgctgacaaaacctcacgaaatggcacatcttgatagccagcttttggaatggtatgataaccttccttatattcttaaagaccatgagccatgctctgagtcgattgcgatcacgagaaccgtcatgaagtggcgctattacaaccaacgcatgctcttgtatcgccccaccctgctcagctatgccatgcgccgcgtaccatacattgtgctcaggtctgaagaaaggacggcaattgaaagatgtagggagattgccgaggctaccatacaagatgtagccgccaaggcacaattccatcagatgtcaggctggaacgcagtatggcttatcttccaggctgctatggtccctcttctaggcttgtttctcaatgatggtacggttgatgatccaagagcgacagctgaagcgtgccaggctcaagtggaaacaacaatgcttgtcctggagcgcttggaaccttggagtccagccgccaaatcaacgctcgaggctgtttcccgaatatttgaggctggtaaacgtggccccagcgtcatcggggaagcccacagcattaacagcggtagctgtgtaacgtctactgaagagactcttggcgcagttcctggggtatctccgatgcaagtcgactttggtcgcgctattccacacgacagtggatttgtcgacccatttgaaccccagtttatcaatgattctgctggacagtatctatgggactttcttagttggagcgatagcaacttgttgcagggtttggctgatattgacaatgtcaacaatggaccactgtttccccaggaggagagaaatgcaaagtatggatccagcgacactgcgttttttggaggccaattgggagattcaacattttttatcaattcagggccgtccttctactaggctgtacttacagggtgcagccttatcgctgccggtgttcacttttgtcacatggtgttctattattcactcgctctatgtttgttttgttgttccccgccatatgttagcgatctccacattacagaattatttatgattgatgcatttacgggcgattcggaggattcggaggatttatgtcgagaacacggtatcacgatagcaaaaagaactgcttcagcaatatatttttgatctacaaagtgta

SEQ ID NO: 144 - DNA, 2205 bp, Botryotinia fuckeliana
atgcaagttctcagcaccgaggccaagaagataccgctatcgacgtatttttgtcatattccatatcgagttgataaagctgcacttgctgtgatcaatttgcaagttattccagaccccaatccaatccgaaatctatcgaggtgggtcggatactgtccttcggacatcggctcccattttcatgccttcatcaattggttcaacaaagatgtttcatacttaacccttgatgctctctctcaatccctagacgaatgtcgtactgtcttacgtcgacttttcccggatcaagaaatgcaacaattgttgccgttgtcgcgaaatgaactcgtcgccctcatcgaccggtctcctcgaagtgcgctttcaattgcatcgccctctgcttcaaatacctctccaacatcgcaggaatacaggtcgcctttaaactctgggtcggacgagtgtagaagcctggcaaatctcgaacaaataccaaatcaagatatcgaatgggacgaggaaagaagaaatcgagatccaatacccaccgaggcggatgatgtaaatgccttgtctctctcagttgatagacagtcgtcgtacttaggtgcgacttcaatcaaagccgcccttttggttatgctcaaggtagcaccgagactacgatctctcttcttggcgccttctaacaacaggcaaatatcagcaagtagtaactatcctacaccgcgaccaggaagctctgccaaagatttacaagcgatctcatggtcatctaatggccagactcttattgatgcatatttcaatagagtacaaatatttgtaccaatgcttgacgaacccacgttcagagccgactttttgagcgggcgacgtcaagatgcgccgtggcttggtctattaaatatggtatttgcaatgggcagtattgtcgcaagcaaatcagacgaccacaatcatatcaattactacaaccaagcgaaggatcacctgggaattgattcttttggcagcgggcatttggaaacattgcaagctctgtcattgatgggtggattataccttcactacatcaatcgtccaaatacggccaatgctatctgtggggctgctttgagaatggcttgtgcaatgggattgcaccgcgagagtatgcacgagaatagcacggagagcaatttgattgcagaacagagacgaagaacatggtggagtttattttgtcttgatacatgggcatctacgacactaggaagaccttccatgggtcgctggggccatgctatcaccatgcagcctcccgaatcaacacttaacactaaccaaaatatgaatatcactccactggtggagaatatcaaattctgtaaagttgccacacaaatccaggatgctcttgcccagaccccacttctccggaacgatgacctcacaaatctcgatagacagctcgttgaatggtatgataatcttccctggatcttacgctctacagaaccttgtcccgaatcaattcataccgctcgatgtgtcatgaaatggagataccagaaccttcgcatggtactttatagatctgttcttctaaatcttgccaatagaggcaatcaaggaatctcacctaccaaggaagaactcgccgcagtccaaacatgtcgtaaaattgcccaagaatccattgaggatatatcacgagaatggactccgaaccagatgttaggttggaatggtgtttggttcatgtatcaagcatccatgattccacttgtcagtatgttctgggaatcatggaacacgaatctcgtacggatttggcaatcacagattgaagttgtgctcgaagcgtttgatgggatggccgattggtctttggctgctaaacgaagtagggaagtggtgagcaaggtctatgaagtcagtaagcgacctctgactagacagccgagtccggggttgggccacatgacagatgatatgaatcggatggggggaatagatgggagaaattatatggatagtgatatgttgcagcaggttgagattatgggagaagaacaattaatgatgcttgacaatggtgggatatgggacttagacggcatgttatggggaaatttgcctgatggtttggatatgccatatgatggtttgcccatgcagtatgatgattctggaatggctcaattcgaaggaccatatatcttccatcaatga

SEQ ID NO: 145 - DNA, 1554 bp, Sclerotinia sclerotiorum
atgccttcatcaattggttcagcaaagatgttccatacatttcaaggactggcgccaccccgccaaactttaagctccgagcaaacaatccaagacaccccaaaagcgacaacgaatggagtgacgaagagaattacaacaccacatgcatgtgcagaatgtaaacgtcgtgcgacttcaattaaagctgcgcttttggttatgcttaaggtagcaccaagactccgatctctgctagcgccttcaaacaacaagcatattccagcaagcagcaactatcctacgccgggaccaggaaattctgtcaaagaattacacgcagtctcatggtcatccgatggccagacactcattgatgcatattttaatagagtacaaatatttgtaccgatgcttgatgaacccgccttcagagccgactttttgaaagggcgacgtcaagatgcaccgtggcttgcattgctgaatatggtatttgcaatgggaagtattgtcgcgaacaaatcagacgaccataatcatatcgattattataaccaggcgaaagaccatttaggaattgattcttttggcagtggccatttggaaactttacaagccttatcattgatgggagggtattatcttcactatatcaatcgtccaaatatggcaaatgctatctgtggagctgccttaagaatggcttgcgcaatgggtttacatcgagaaatcgccacgcaaattcaggatgccctcgctcaaacgccacttctccgaagcgatgaccttgcgaatctcgatgcacagctcgtagaatggtatgaaaatcttccttggatcttacgctctacagaaccttgtcccgagtccatgtacaccgctcgatgtgtcatgaaatggagatatcagaatcttcgcatcgtgctttacaggcctgttcttctgaacctcgctaatcgaggtaaccaaggaattgcatcgagtaaggaagaaattgccgccatccgaacatgtcgtaccattgcccgagagaccatcgaacaaatatcacgtgaatggagtccaaaccaaatgctgggatggaatggcgtgtggttcatgtatcaagcatccatgataccacttgtcagtatattctgggaatcatggaatacgaatctcgttcgagattggcaatcacagatcgaggttgtgcttgaagcttttgatggcatggctgattggtcgttggctgcaagacgaagtagggaagtcgtgagcaagatgtatgaagctagcaaacgacccctaacgagacatccaagtccggggctcagccagatttcggaagatatgaatcgaatgggtggtatagatgggagacattacatggatagtgagatgttacagcaggttgagattatgggtgaggaacaattaatgatgcttgataatgggggaatatgggatttagatggcatgttatggggaaacttgccagatggcttggatatgccatatgatggcttacccatgcaatatgatgattctgcgatgggtcaattcggaacgccatatattattcatcaatga

SEQ ID NO: 146 - DNA, 2469 bp, Podospora anserina
atggagatatataagtctgcgtctgctccccatgttctcgcctctcttcgtcattacccacatctatctttatccaactttggactttccaacatggccccatcaatcccagttcccacccagggtggcatgttccacaccttccaaggcgtcaccccacggaagcagtcaacagactctcaagatagcacaaagaccagctccacaggtacagccaagaggataacaacaccacatgcttgtgccgagtgcaagagacggaagatccgctgcgatggtcaacaaccatgtggccaatgcctctccagccgggctcccaagagatgtttctacgacaagcacagacaaagagtgatcccatcacgcaagacactcgaagctctatcacagtccctcgaagaatgccggtcgatcctgaagcggttatacccaacacaagatgtgcagtctcttctgcctctctccagacaagaactcctcagccttcttgacaggccaacaatagatacttcggtcggcggcttaccatcaccaccattaaacaccagtcccatgtcggacttggactcaccaatgatgccaaagacggagaacctgctcgagcagatgccatccagagacacagaatgggacgaggagcgaagaggaagagacccgatcccagccgaagccgacgacatcaacgctctttcgctctcagtagaccgccaaacatcctatctcggtgcctcctccatcaaggccgccctcatggtcatgctcaaggtccaacccggcctccgaaactccctcgcagccccattaaacggagtcgagatgtcccacaactacccagccatccgccagaagcccaccacccaaaaggacccccaacgcatcccatggtcctggaagggccaaacactcatcgacgcctacttcaaacgcatccacgctttcgttccaatgctcgacgagtccaccttccgcgctgattacctcgaaggccaacgaaccgacgccccatggctcgctctgctcaacatggtctttgccatgggttccatcgcggctatgaaatcggacgactacaaccacatcaactactacaaccgcgccatggagcaccttcccatggacgcctttggctcctcccacatcgagacggtccaggccctcgccctcatcggaggttactacctccactacatcaaccggcccaacatggccaacgccgtcctcggcgccgccatccgcatggcctccgctttgggtcttcaccgtgagtccatcacggtaggtctcccaggcagcgacatcatcgcagccgaaacccgccgcagaacctggtggtccctcttctgcctcgacacctgggccaccaccaccatgggccgtccctcgttcggccgctggggtcccgcgatcaacatccgcccccccgagttcggcatcaacgccaaccgggattcatcccagcacgcaggaatcctccctctgatcgaaaacatcaaattctgcaagatcgccactcaaatccaagacatgctcgccatcaccccccttctcaggacagaagaccgctgcgccatcgacgcccagctcgtaaactggtacacctccctcccttggctcttgcggacaaccgacccctgcgcggaaccgctctacatggcccgctgcatcatgaagtggcgctaccaaaacttacgcatgctcctccaccgccccgtcctcctctcgcttgcctcctccggcctcaacccccacacccaagcctgcgacgcggacctccaagccattgagacctgccgtgaactcgccgcggccaccatcgaagacgtcggccgtgaatggacccgcaaccaaatgagcggctggaacgcagtctggttcctctaccaagcagccatggtcccgctcgtctccgtcttctggcaatggggctctccccgcgtgccagagtggctcaagcaaatcgagcaagtcctcgacctcctcgaggtcatggaggagtggtccctcgccgcccggcgctcaagagaggtagtctggcgcatgtacgaagcctcccgggcagtccaagcccaaggcgccgctgcccgctcccaatcccccgccggcctccacatcaccaccacagccgacagcatcgtcgtcggcggcggagaggttcacatgagccccattggtctcgagccagtcgacggaatggggggtatgatgggcctgcttgatcaagggggtctatgggatctagacgggatgtactggggtggaaatggccctcagtccccaacacacactggaaacccagacgacagcgccgccgccgccgagtttgccgcttacgctgctgctcaacaagccgcctccgccgctcatcaccaccaccccgagctgatgcagcatgtggactatgggatgatgcaccaccaccacgctggacatcatcacgtggggatggagggctttgggtatgttcagtga

SEQ ID NO: 147 - DNA, 1929 bp, Pyrenophora tritici-repentis
atgtttcacacttttcagtcgtcagtcaacgtgcgctcgcccggcggggacagcgacaacgccgcgaagccctcacggccaccaggatctcggcggatatcgaccagcaacgcatgtgtcgaatgcaggagacgcaagatccgctgcgatggcacacagccatgtgggcagtgccaatggtaccaacatcctgaggcctgtggctactctaagcctgcccaaagagtggtgcccagcaggaagaaacagcgctaccaagccgggcaagttctccgccacctggactcgcagatgacagaccagacgcactaccacctcccggagcacggccaacaactcattgagagttactttgaccgtgtacatcctttcttcccgttgattgatgaacgcaaattctggtctacttatctctacaacaatcgtagcgactcaccatggctagcactcttgaacatggtctttgctctaggttcgcttgcatcccaagctgctgacaatgagacccaccatatctactttactcgctcacgaaagcatttatctctagaatcattcggcagtggcaacctggaggtccttcaagctttagctatcatgagtggatactacatgcactatctcaatcgccctaacgaagcccactcgctcatgggtggtacgctacgcatggcgactgcgctaggcttacatcgcgagtattcggaaagaagcgatgcaagtcgacaaacgaagggtgtgagtgaggaagactcgatatcccctgagatgaggcgacgtatatggtggagtctgttctgtctagactcgtgggcgtcgacaacaacgggcaggccttcgttgggaagaatgggtccctcgattacggtcatgagacctggcactgcagccaacgccattcaaactataccgcctcctaacagtcctcaatacatcgagcaactcaaaattctccctataattcacgcatcagcattctgccagatcgcaaccaagatccaagaccgtcttgtcgaatgtcccctcctgtcttcggtggaaacggctagctacgacgcacagcttgtgaagtggcacgaagacctgccttctatgctgtccaaacctgacgaaccatgcccaaatttcctccgccgtacccggttggtgatgaaatggcgattccaaaacatccgcatcatactccaccgacccatactccttaccacagcactccggcacgcctcatgggctagcctcagtgcagatgaaaaggtgtcggtaggaaaatgtaggttcattgcttgcaagacaatcgaagacataagccgggactgcatgcccgatctcctctcaggctggaacgcagtctggttctgcttccaagcctgtatggtcccgcttgtttctctcttcagcgacccaagtgtacctgaagaagtagaaaagtggaaggccagtatcaagacggcattgaacttcttcgaggcggtcaaagattggagtatagccgcgaagaagagtaaagatgctgttgcgcgcttatatgccgcgtacaagacacaggcttcgacactatctcaacaaacacaaaccccagtgccgcaaatgccctaccctcaacagtatcaacaaccatgccacactcagacacatacacattttcctgtacctggcacatcaaattgtcctgccatgaccaactcgcaaacgacaaactatggacagcaacaacaacctgcgttcatccaatacaaccccgcaacgcccggttgggtaaacactggcaacgacccagctatcctaaacaacttctgggacgacatgatgtgggacaccaacctaccagacatgctggaaacccccttcggaatcgcaactgattacgagtatgtgggtgcagcacaggatcccgggcccggtggggcatgttggatgcatgggaactaa

SEQ ID NO: 148 - DNA, 2238 bp, Penicillium marneffei
atgtttctcacattcgaggcctctcaacacaacaacaacgacaacagaacaagccttcgcaacccaaaacaagagcgtctcaatcgacgacgccgctccacaccgcgagcatgcacttcatgccgtcaacggaaaattagatgtgatggcgagaagccctgtgaggcttgtcggtggtacaagaaggctgagcaatgtagttatccgggacgggagcgagaaagtcactcagaagagatatcattaccggattatcgaggcgcattgaaacggctgtttcccgaaactgcacccgagaatctcgtggatttgtcgagggagagattgctggctttgatatcgaagccgacagacgggtcgccttacatccagcactcccagcatcaagactcattgacaatagccacatccacatctgtagagacgcatgtctccgcactagcaatggaaaggcctggcttggagtcattgcactcaatcccggcagaacaagaacaactcgatgaaaaccggtgtgctagcgcctccgaagagtcagaggagcatatatcagacgacgtcaatgcattgtctctaccggctcgaaatcttacttcgtatctgggcgtgtcgtctattcaagctgcgttgaaagtcattgcgtggcttcatccggaactgaactcacatctttcgcacgtcccaaaagaccagcgtcagcatcaccgtcgttcatcaatttcagctggcttaccaccttcagacctgcaattgctagatgcatactttgacaatttccagccattttcgccactactagacgaggaaacctgccgctcaacctttctgtccggtcgccgaaaggacaatcgctggctagcactactcaacatcatcctcgccctgggaagcatcaccgcagcaggcgtcgacaaccacaaccaccgaacctactttgaacgctcaatgagctttctcaacttcaaaatcctcggtaaccccagcctcgaagtcgttcagactctaggcctcatgggcggctggtactgccactacatcagccaacccaatctcggatacgcgcttatgggcgcctcgttgcgaatggcggttacactgggtctgcaacgagagcctcccttcgatagccatatgtcggcgggcgttagccccgctcgatctgggtatcaggaattcaaacggagggtttggtggtctctttgttgtttggagacttggggtcatgagacgttggggaggccgagtatggattttttcaggccgagtatcacggtcaagttacctcatttacttgataatgagaactatatcaaagtcctccccctaatcgaaaatgtacaattcatcaaaatcgcctccaaaatccaggaatcactcgccgcactacccacattaacgcataccgaactgctcaatctagactcccaactcctccaatggtggaacaatctcccaccagttctcaaggactacaccccctgccccgaagctttgtacgccgcgcgaacagtcatgcgatggcgcttctacaatcagcgcatgctcctttaccgccctcgattgctaaactatgccatgcgccgaatcccattgatcgcaatcaaagacgaggaacgtgtcgccgtacagcgatgtcgcgaaatcgcggaggtcgcgattgaggatatctctacgactactacggcgatgaagatgaatcagatgattgcctggaatgcggtgtggttagtgtttcaggctaccatggtgccgttgatatatctgtcggtcgctgcagttgcagataaacaacgtgacgatggggatgatgttgaaacgtgtaaagcgcaggttcggaggagtatctcgacgctggatcgtatgaggccgtatggccatacagctaagcggtcgtcgggcatgatttcgaggattcttgagattattctgcgtacccctgacactggagtgagggcatctgtcctagaaactcacaacaatgcagggaatacggaaccccagaattatcctccctttctgacgaatcatcaacccatcgcccgagagcgagttctggattggactgctacgactgctgctactaccggtgctaccaataatacgtcttttgaaaattattcgtctcaacatgtgtgggagtatctgagctggggcgagaataatgatttctgggcggagctttataccagtttgaatcctcaggaggaagcaaatttctttgacgctaggattcaatga

SEQ ID NO: 149 - DNA, 2316 bp, Aspergillus flavus
atgttccacacctttgaaggattcgaaaacccgaacaactcggccccagtccggggtcgtggtgagcgccagccatccgtcggccgacgtgtcactacccttcgtgcctgtacatcatgcagacatcgcaagatcaagtgtgacggtgaaaagccgtgcgaagcgtgtcggtggtataagaaagccgaccagtgtcattatgcagatccccggccctcccgcagacatgtagaaaaactctccaccactctggacgagtatcggggcgtgctcgagaaactcttccctaatatccaacccgaaaatttagttagcttgcctcgcgaaaagcttttggagctgatgggcaagccatccctgctgcagacacagcctccacacccagcgtcaccagctacctcggcatcggtcgaagcccatgtctcccccgtctccaacgaagatggcaatttggaatctttgcagacgatgcctgaagaatccagtgattctcaaaactcgggttatacggagatatccaataatttttcggacgacgtcaatgctctgtcactctcatccagacagccctcctcttatttgggcgtgtcgtctatcaatgctgttctcaaagtgattctctgccttgaccctggcgccctctcttacttctctcatccctcgaccaacacagactccagggattcagctctaggatactccccagcagaagcacaaccatggccggtccaagagtctcaacaaccaataacgccccctcaaccacatcgaccagtaacagagatgcagttgctcgacgcctactttacttattttcagccattcgtgcccatgctagatgaggaagttttccgcgaggtctatcactcggggtgtagaaaggatgaacgttggctggcactgctgaacattgtgcttgccttgggtagcatcgcagcatgtccatcggatgacatgtcccacacaatttacgcccagcgctgtaagagctacttgaatttagaatcgcttggatcctcacatatagagaccatccagactctcggccttctgggagggcagtatcttcattatgtcagtcaacccaatctggcatattcgctcatgggagctgcgctgcgcatggctgcagctttgggcttgcacaaagagttttcagataaccaggaagggtcgtgtaagcagaacatatattcgactgacctgaaacggcgagtgtggtggtcgctgttttgcttggacacttggggctgtatgactctggggcgaccgagtatgggacgatttggaccgacgattaccgttaaactgccgcagtaccgagaaagagggaatgttctcgacattataccgcttctagaaaacgttcggttctgcaaaattgcgacacagatccaggaaattctggctgccgctccgttgacgaggtaccacgagatgtcgcactttgataatcaactgttagagtggtatgagaaccttccgtatatactcaaagaccacgagccatgctccgaatcaattatcatcaccaggacagtcatgaaatggcggtactacaaccagcgtatgctcatataccgtccaactctactcagctacgccatgcggcgggttccatatattgctctccgttccgaagagcggacggcgatcgaaaggtgtcgacagatcgcggaggctacaattcaagacatttcttcaacggcccagtcacatcaaatgtcgggctggagtgcagtctggctcatattccaggcagtcatggttcccctattgggattgtttctcaacgacaacacaacgaatgaccctagagctactgttgcgagctgccaatctcaagttgagatggctatgcttgtcctggcccgactggaacaatggagcccgactgcaaaaaggacgttgggtgccgtatcgcagatattggaggctagtaagagagggactaacatggccaacgaggctggccttgtcaatagcatgtttgctgtctcacgcgagggggcagtgcctcgagccgcttcagggtttcatccgtcccaaaacattttccttcagaatgaggcaggctttgatccgtttgcgcctccagttattgacgactcgacggctcagtacctatgggacttcttgagctggagcgatagcagcctatggcctggaataacggacaccaatagcttcaacgacgaaacgctgttcgcccaaacagacaaaaccatgaaatatcccaacaacggtgcagcctttatggggggctctatgggagacggtgcctactatgcaaatccacctttgccctactactaa

SEQ ID NO: 150 - DNA, 2524 bp, Talaromyces stipitatus
atgtttctcacatttgaatcttctcaagccaacaagaccggtctccgtaacccaaagaagcaaatcagtcccacgtcaataacaacaagacgaagcgagcgactcaacagacgccgcaccacgccacgagcgtgcacatcatgtcgtcaacggaaaataagatgcgacggcgaaaagccctgtgaagcttgtcggtggtacaaaaaggccgaattatgttcttatcccgaacgggaacgggggatggggagagaaaggaatagtcaagaagagccggcacactcatcatccgactatcgaaaagcattggagaggttatttccggaaactgcgccggagaatattgttcatttatcaagggagaaattgctgggcttgatatcaaagagttcagctgcaggatcgcagcatcatgattcaatgacaattgctacttcagcatctgtagagacacgccattcaacattgtcgattgaaaggccagctgggctggagtctctacattctataccgggggaacagcagaaacgaatccaccttgacgatgaaacgcaatgtatcgacggttctgaagaggagtctattgaacatatatccgacgacgtcaatgcattatctctaccggctcgaaatctcacttcgtacctgggtgtatcgtcgattcaagctgctttgaaagtcattgcgtggctccatccagaattggactcgcatctttcgcgcctctcttccaaagaccagcgtcgtcagcatcatcgtcatcaagaacaacccggcgtcttacctacagaagagcaaatgctagatgcctactttaccaatttccagtcctttgcaccactcatagatgaagacaccattcgctcgacatttctgtccaaccgccgaaaggacgacaaatggttagcgttactcaacatcatcttcgcattgggcagcatcacagctgcaggtgtggataaccacaaccatcgaacatactacgaacgctcaaaaagctatttgaacatcaacacgctgggtaatcccagtctcgaagtcgttcaaaccctagggcttatgggtggctggtattgtcactacatcagccagccgaatcttgcatatgcgctcatgggtgcatcgttgcggatggcggttactctgggtctgcaacgggaaccccctttggatagaaacctgcctgtgattggaaccgggtatcaggaatttaagcgtcgggtttggtggtctctttgttgtctagagacgtggggtcatgaaacgcttggtagaccgagtatggatttctttagtccaagcattacggtcaatctgcctcgggtgcttgataaggaaaactacatcaaaatcctccccctaatcgaaaacgtgcacttcatacgcctcgcttctaaaatccaagactcgctcgccgcactaccaaccaaaacatactcggaaatgctaaccctagactctcaactcgtagcatggtggaacaatctccctcccgtcctgaaggattgctcgccttgcccagagtccatctggccggtacgaacagttatgcgttggcgattctataatcagcgtatcctcctctatcgtccctcgttactcaactatgccatgcgacagatcccgtttgtggcagtgagagatgaggagagagtggtggttcaacggtgttgtgagattgccaagatggcgattgaggatatttcgggtacgacgacttcgacgatcgggatgaatcagatgattgcgtggaatgcggtttggttagtttttcaggctactatggttccgttgattttcttgtctacttgttctaccgctgctgctgcgacacaagatgatggggaggttgaaagttgtaaagtgcaggttcagactgctatatcaactctggatcgtatgagggtgtatggacatacagccgagagatccctggaaatgatttcggctattctggatactgttttgggtatttctactgtgagagcctataattcagcaggtctcaatgaaaacatcgaatctcagaacttgcctcctatgacggagcatcaaccgattactcgagatcgagttctggattggactgctgctgctaccacttcatcgtcattcgacaatttctcctctcagcatatgtgggagtatctaagctggggtgaaagcaatgatctttggccggagttgtacaccaatctcgatcctcaggatagtcagattgagggtgcggatttcttcaattctaactagtgtatacttttgcttacaaacagactattgacccaaataccgatacttcaacggagcagaactctcatcaagtcccgtaactataaccacctgctcatcaccgggaacaatatccatagcactatcactaagccgcacgttatccctctcttcaaatacaagacatttcacgggcctttgtgcgctgattttgaggatctgttgcttctctccggttgatgatgttcttgtttctggttttacttccagtccacggtctgagaaatcgaggtat

SEQ ID NO: 151 - DNA, 2145 bp, Uncinocarpus reesii
atgttccacatttttgaggggttcgaaaatccagataaggcccggagtcagagccgcgaaggccgtggcaaggctggaaaaagatcctcaacggttcgcgcgtgtgaacaatgtcgacgtcgcaagattcgctgtgatggggaacagccctgcgaagcgtgtcaatggcatgtcgaaaagctatcttcgaccgtcgaggaataccgaaccgttttcgacaaacttttccctagtgttcctttgcaatcccttctaaacctgccgcgcgagaaactcttagagctggcctcaaacgcccaatcgcatcctgaatcttctccggtccctgcgtccgcgtccaagtactcaccgtctgccgaaaaccatgtatccccactcccaccagacgacgaaaacctggaatctctccagacgatgccggacgataccactgagagtcagggatcgagcagctcggacctcttggctacagtctccgatgatgttaacgctttgtctttatcgacaaaacgcccgtcaacatacctaggaatttcttccgtgaacgccgtaatgcgagtaattacttggattgatcctgagagctcccagcatttttcgaggacctccaatcgacagccccgatcgaaacaagagaaagtagcgccccgagacggttctgggtgggctctaccactccaggccccccagcgtggaccatttggaatttttgcactcggaagtatcgccgcatacacggctaacgatacatcacacgagggtttctatttgagagctagacactacttgagcttggacactctaggaaatccgcatttggaaaccattcaaaccctggccctgatgggaggacattatttacattatattagccagccaaatttggcgcattcttttatggcggttgctttgcgcatggccataatgctgggcctacacaaggcattcgcggataatcataatgatgccagcctaggtaaccaaagaaaattctccattgacctacgaagaagaatctggtggtctcttttttgcctggacacttggggatacatgacacttggcagaccgagtatgggacggagcggccccggaattacagtcaaactcccccaatacaatggaaccagggaattggcactgtgtgttctatctttagtggaaaacactcgattttgtaaaatcgcgacgcaggttggggatgccctcgcaacctctccgatcgttgcctattcagaattggttggccttgacgatcagctggttgaatggtttgacaaacttcctccagtgctaaaagatcacgagccttgcccagatcccgtcttgacaacacgtactgtgatgcgatggcggtatcagagtcaacgaatccttcttcatcggcctgtgctactgagttatgcaatgcgtcgtgtcccttatgtggcccttagaacggaagagcgctacgctattgaaaagtgtagaatggtcgctgacgaaacaatccgcgatgtcgcttccaccactcgactgaatcaaatgacgggatggaacgccgtctggcttcttttccaggccacactgattccgctgcttggacttttcatcgctgacagcactgccactcatccatatgccacgttagatagctgcaggaatcaagttgagaccgccatgtgtgcgttggaacgtctggaatcttggagcccgacagccaaaaggactttggaggtggtttcaaaaattttggaagctagccaacggccacgcactaccgtcactagcagtttcatatctggaagccaagctagctccgccgctgtatcattgaacacaccaaacagcagtcctcccgtccacaacatgaatcaagtaccggtacttggtggcacaggcttccagggctaccaagctatcgctccgtatatggggaacacaccacaacaaatgctggattttatcagctggggagacaatacgagtatttggcccagcgcgcaggaagatttctaccctccgccagcgactaccgtggaattgctcggccatagcgagcattatcttaaatcacttggtcatagcgccactgtcacaggtgcaagggaagcgatgtacgacgctggattgccacccacccaaaatgtcgttcggttctcatag

SEQ ID NO: 152 - DNA, 2196 bp, Penicillium chrysogenum
atgtttatcgcgttcaaagctcagaacgaggagggattgcggaacccaaaacataaaaggcgaagtgaacgactcagtcgacgggggtctacaccgcgtgcctgcacttcatgtcgtcgtcgcaaaatcaaatgcgacggcgagaagccctgtgaagcatgtcgatggtacaagaagcctgagctgtgtgcctatacagaaccgcgatcctcgcagcaaagccagccggagaaactgtcaataccctcgcccgactacaaaagcacacttgaacgcctttttccggacaatgcccccgagaacatcgcccatttcccacgcgataaattgttagagttggtgaccgcaggcggaaccccatattctcaccatcaggactcatcgatcgcggccgggtctctagacactcataactctacattgtcgggagagatgcccggccttgaatcactgcatacaatacccggagagcagctcgatgaaaatcaatgtgctagtgcttcggaatcggtaggacatatctcagacgacgtcaacgcattatcgctatcagctcggcacccgacttcctacctaggtgtttcgtctattcaggctgcactgaaggttattgcgtggctccacccagcagttaacacatacttcgcccaatccttgtcgaaagatcaatgttcgcagccacctaatgcgttgcccgcgtcgcgagctgcaccccagcctgaccccccacccacggaaactcaaatgctagacgcgtactttgtcaacttccagccatttgcaccactcatagacgaagaagcctttcgcacgacttacttacttggccgtcggaaggataatcgatggcttgcacttctcaacatggttctcgcactgggaaatattacagcagcaggtgcagataacaataaccaccgggtgtatttcgagcgttcaatggatcacttgaatctacgttctctagggaatcctagccttgaagtggttcaggccctaggacttatgggtgggtggtactgtcactatactagccaaccgaatctcgcatactcccttatgggcgcgtcgctgcggatggcggttacgttaggtctgcagcgcgaaccttccgatattcattcgatgcttgaccctaagaagtccgggatccaggaattcaaacgtcgcgtctggtggtccctttgctgtttggagacctggggccacgaaacgctcggccggccaagtatggattactttggcccgagtatcacagttaatttgcctagccggcttgacaaggaatcatatttcgaggtcctccccttgacagaaaatgtccaatttgtcaaaatcgcattaaaaatccaagaatcgctagctgcgctaccaaccctatcccacgcggagatgttcgatctagacgcgcagcttgtccggtggtggaatgacctaccgccggtccttaaggattacgaaccctgtcccgaatcactatacgcagtgcgaaccgtgatgcgttggcgattctacaatcatcgcatgttactttaccgcccgactctactgaactacgcgatgcgacgaataccctttatggccattcgggtcgaagaacgcaccgccattcagaaatgccaggaaatcgccgcgatttccatccaagacatcttctcgacaaccaaattgaaccaaatggtgggctggaacgctgtttggatgttattccaggccaccatggttccgctgatttgcctgtcggctggcgttgcagatcacgattccgctgcttcattcgaagcttgtaagacgcaggttgaaacggctatgttgacactcggtcgcatgaagccatacggacacacggcgggacgttcccttgaagttatctcgggcattctcgagtcgaaccttcgtgggcccatggcggcgccggtcgatgcaaatggagatagcctcgacccccaaaatccgcagaatcctccaaacccgcagaattttcctcctcccaatgctttcaacgctggtcagcagatctctcgtgatcgtgttgcggattggactgctacttcctttgaaacgctttcgtctcagtacatgtgggagtatctgagctgggaccatagcaatctctggcctgaggtttttgacctcaatactcagaatgataatgtggcaatgtctttcctgaactcacccggaggaaataggtga

SEQ ID NO: 153 - DNA, 2304 bp, Penicillium chrysogenum
atgttccataccttcgaggggtttgagaaccccacggctgcaactcctgcccgcaaccggtctaccagtgaaagacgtgaatctattagtcgccgtgtgacaaccttgcgcgcttgtacatcttgtcgccatcgcaagatcaagtgtgatggcgagaagccatgtgaggcatgtcggtggtataagaagtcggaccagtgtcactattcagacccgcggccctcgcggagacacgtggaaaaactatctacaactctggaagagtatcgaagtatcttggggaagttattcccaaacttctctccagagtcattggtaaatttgccacgtgagaaactcctcgagctcacaatcgccccgtcgggctctcacatgcaaacacagtcacatcatgccgattcaccatccacgtcggtttccatggaagcccacgtctcgcctttgtcaaatgaggatgacaacctcgaggctctgcaaaccatgcctgaggaactaccggatagccgtaatactagctcctcggatctagtagagggcgtctcggatgatgttaatggcttgtcgctgtcggctcgccagccttcatcttacctgggtgtatcatccatccaagctgtgatcaaggtcattgtctggttggatccaggctgcgcctcgtacttttcccgaactcccgtcaacgaacaggaggatgcgatcggatggccgcatcgtgcgcctgtcacacccccgcaaccccttattccgccctcagagatgcaaatgctcgatgcatatttcctctattttcaagcctttgctcccatgatcgatgagcgctccttccgcgaggcttactgcgctggtcgtcggagggatgaccattggcttgctctactgaacattgttcttgctcttggttgcattgcggctacaggacccgatgatacgacacaccagacatacttcctgcgatgtaagagccacctaactctgacttccttgggaagctcccatatcgagaccatccaggcgctgggactgatgggcggctggtactgccactatatcagccagccgaatctggcatactccgttttgggtgctgcgttgcgtatgtcggttgctctgggactgcataaggagtttgcagagacccgccaaataccgagtccagcgaagctagcgtctatggatcttaagcgccgcgtctggtggtctttgttctgcatggatacctgggccggcatgacactaggccggcctagtatgggtcggataggttcaaacattacagttaaacctcccctctgtcgagacaagggaaacgttctcgaaatcctccctttggtggaaaacatccgcttcgccaagatcgccacccaagtccaagagtccctcgccgcagcaccgctagtcaagcaccaagaaatggcccacgcagatgcgcagcttctagagtggtgggacaacctcccctccgttctgaaagaccacgagccctgctcagagtcaataaacactgtgcggacagtcatgcgttggcgctactacaaccaacggatcctcctgtaccgaccaacactgctcagctacgccatgcgccgcgtgccttatatcgcactgcgatcggaagagcgcaccgcaattgaaaaatgtcgcgaggtcgcagatgaatctattcggaatattgctgctacggcgcagcttaaccagctctgcggatggaatgctgtctggtggactttccaggcttctctggttcccttggtgggattattcctcaacgatccaacggcaaatgaccctcgcgcttctattgagtcctgtcaggcgcaggtggaaatggccatgatgaccctggcccgcatgcagtcctttggccatactgcgaagcggtcgctggatgctatctcgcgtatctacgaggctagcaagcggggacaggatcttggcgatcctgattcttccgctagtgttcttagtagcactaacccttatcccgctggtcgggatatgtcagtcatgttcccggcacctgaacagggtcgtggtaacgtggctatgggcgagaatgggttccttgaccccctcgctactaccccgttcgcggatgattcaggaggccagtatctctgggagtatctgagttggagtgacaacaacttgtggccaggaattgtcactgatgttgatgggaggaacgacatgatgactttgttgactccggatcatgagaaaggcccaaaattcggagaacaacctgcgtatttcgatcccatgccggatcctgggtactttgcgaacggcggattttattactga

SEQ ID NO: 154 - DNA, 1728 bp, Verticillium albo-atrum
atgtttcacaccttcggtagcacggacccaccggcttcacatttatcgccacaggtcgcaagaccgatctcccgcagagtcaacaagtcatgttcggagtgtacacggagaaaggtcaagtgtgatggccgtgttccctgtactagctgccagtactacaaaacttcggagagttgcgtctacaggcaacggaccaagagacaagctgtcagcaagagggcattcagtacattggagcaggtgaccgagcaaatgcaggtacaacaacgcattctcaatacattgttcccgcataattcacccgaggacctggttgggagatcaagaacagaacttcttcagctcttgtcgactgcttcgccatccgatacttcggtttgcaatatttcacctgagccattgaggccttcacctcaatactttttatcaggcacaggtggcacagacgtgtctgatggttcaactcaagcatccgaggctggcgatactgttcaagagagaagatgggacgaatcagctcagcagccagcagaaattggcgctagcgatgacatcaatgccatcagtttggctacagatcaacaccgcccctcatatttaggcgtcacctcaatgagtgctgttatgggggcgttattccgactgtgcccagcggctaaagctcgtacgatagaattctcgaaagaattgacaaaagaacagcatccgcctcaccagcaagcttcagacctgatttcgggacccaacttaccggccctcaaccagcttcgagaacagcgctgcgtcgagttctatttcgaacacatacacgccattacacccattttgaatgaagaagagtttcgaagaacatacatagggggcacccggcaagatgcttcatggttgggacttctcaacatgattctgacgcttgggtccattgcctctggcagtaacacattgcacgtgcaatactacaaacaagcgagggttttcctcgacctggactctctcggatcgggaaacatggaaagtctccaggctctgtgcttactgggaggctactacctgcattaccggaattccccaaacatggcatatgctgtgcttggtgctgctcagcgcgtcgccattgccctaggcttacaccgagactcgtcgcgccgtactcatgatcaaggagccgacacaaatcaagaaaatctccttcgaattgaaacgcggcggcggacatggtggagtctattctgtcttgacacttgggccagcatgactcttggtcgcccaacctgtggacgatgggataacacgacaatggacacccagcccccaagcctcctttcacctgatgatcattgtgccatctctttaaggtcgagctgtcagttctgccacatttgcaaccgcattcagcatagatttgcgcagctacgaaggatgtctgccattgaagctcttgctttcgaccaagagcttcgggactggctgtatggtaccacttctttcgatcgccatggagacggcatggaggccgggcttgtaccccgaaaaggtggaccgatggtctgcaagcctgacaaaggctttggacatattcaacgacatgaagccgtggatgaggggatcggatcgagcagcccacatggtggctaccctctttcaggctgtcacggtgacggtcgagaatcaggttcacccatcaaccagtccggaaggggcctgggagttaccaggctggtgcgatga

SEQ ID NO: 155 - DNA, 2490 bp, Verticillium albo-atrum
atgtatcacaactttcagatcgagggaggccctcagccggcgtcagccagccagttgggcggtcttgatgcctcagacacgaagacagtgaaggtctccaaagcctgcgccgaatgcaagcgacggaaaattcgctgcgacggccagcacccgtgccgacaatgcatctcgacgcgggtgccaaagaagtgcttctacgacaagcaccgaccccgagtcgtgccatcaaggaagtacgtgacccccctccaaatcttattatgcggatcgtctattgtcgatcgtggcgccccgcagttgctgacaagagcttgccgcagagttcttgagaatctgtcacagtcgctggaagaatgccgatccgtcatcaatcgtcttttcccgaaccaggaaattttcgatttactaccactgacgcgagaagaactcctggagctgttgcgacatcccacgaaacctcatgacgaggcggtgctgccatccccgcctgccaatccctcaccacttgaggatgacgaggaatcactcgaccaagaggtcgagcctggtgctgccgagcttgagcagatgccgaccaaggactcggaatgggatgaagagcgacgcgaacatgaacccattcccgtcgaatcggacgacgtcaacgccctatcactgacaatggacaagcgggcatcgtacctgggggcctcgtccgtcaaggcggttctcatggtgatgctcaagctcaaaccgcagctcagaaatgccctcgccacgcctcgcaacatggcggctgccacaggtgccatcgccgttcaacccgaagccatgcgccgcgcctcggccgtcgagtcaaaaccagcagcaaaagtgccgtggacatggcgcggtcagacctttgtcgacgcctacttcaagcgggttcacgccttcattccgatgctcgacgaggcaagcttccgtgccgactactccctgggtcagcgcgtcgactcgccgtggctggccctgctgcacgctgtgctggccatgggcagcatcgcagccaccaagtcgagcgacctccatcacgaacagctgtaccagcaggccatgactcacctcaccattgattctttcggatccagccgcgtcgagacggtccaggctctggccattatcggaggcttttatctgcactacatcaaccgccccaacatggccaacgcgattctcggagccgccgtccgcatggcgagtgcactgggcctccaccgagaatcactcgcgcagggcctgtcagaaacagatgtacttgccgctgagatcaggaggaggacatggtggtccctgttctgcctcgacacatgggcgacgacgaccatgggccgtccctcctttggccgccgggggcctggaatcaacatccggtctcccgagctgggcatcagtcaggccgccgagtcagcacagcacgccggcgtgctccccatgatcgaaaacatcaagttctgccgaatcgccacacagatccaggacaccctcgccgcgagctcgctgccctcaaccgacgaccgccagagtatggacacgcagctcgtgacctggtacgagagcctgccctggctgctcggcacgacgcagccctgcgccgagccgctgtacattgcccgctgcgtcatgaagtggcgctaccagaacctcaggatgctgctccaccgccccgtgctcctcacctgggccgcgagccagcagcggccggtgccggcgcggtcgcaccggcgcgcctcgcacgcgccgtcgtccgtgtcgtcgtccgccgacgcggggacgtcgcctgggtcgggcgtgctcaacgacgaggagatccttgcgtcgatcaacacgtgctctgacatggcggcgcagacgattgaggacatcgcgaaggagtggacgcggaaccagatgctgggctggaacgctgcttggttcttataccaggcggccatgattccactccttcggctgtgctggcagccgggcaacgcagaggtggagacgtggaggagccagatcgagacaacgctcgagatcctcgacgccgtcggagactggtcgctgacagcgtgtcgaagccgagaggttgtgaggcgcgtgtacgaagcgagttgtcagaacgaagaggttcagccgtctctgacagcagcagcgaaattgatgggcgccaaccccgtagctcagggcgacatgagcaatctgtatggatcgacgggtggaatgggacagacggcggaggactttgacttccgcatgtctcccattcggcttgacacggatatggaggtcgctgctttcatggagcaggattggatgtgggatctagacggtatgttctggggacagcaacctggcacaaacccacaacagcagcagcagcatccgcaacagcatgcgtcactacagatgcatgatacaaatgtgctatatggagatggcatgacggtcatgcctatgcattacaatatggacaacatgaataacggctaa

SEQ ID NO: 156 - DNA, 2118 bp, Verticillium albo-atrum
atggcgccgtccattcccatccctactcagggtggcatgttccatacctgtgagtcttctgccgccgctgctgctgctgccaggctactcctcgcaacatgggctaacatcttccagttcagggtgttactcccaggaagcccaaaaccgctctcgaggacaatgacaagactcttgttgcgtctgctcacaacacagataaccacagcccacgccagtggcgagacaaaacgcaaagatccctgtggccagtgcctgtccagccgcgcacccaagagatgcttctatgacaagcaccgccagcgagtcattccttcacggaagacactcgaggcactttcgcagtccctcgaagagtgccgctcgatcttgaagcgcctctatcccaaccaagagacccaggccctccttcccctttctcgccaggagcttctaagcctcctcgagcgtccagtgctggacacctcaatcgtgacagctttgccatcaccgccactcaacacttcacctttgtcacaggagctggaatccccgatctgtagctcctcagaacaggggctttcgagcctcgaacagatgcccggtcaagacacagagtgggatgaagagcgccgcgggcgtgaccccatccccatcgaagctgacgatgtcaatgctctcgggctctccgtcgaccgccaatcttcatatctgggcgcctcgtctatcaaggctgccttgatgtgcatgctcaaggttcaaccttcgctgcgtacacagcttaccacgccgctgaacacggccgaggttgcccacaactttccaatccgcccccagcagctgggtcccaaggaaaaccagcgtatctcgtggtcctggaagggccagaccctcctggacgcctacttcaaacgcatcaatgtctttattcccatgcttgacgaggctgccttccgcgccgagtacctggagggccagcgctgcgacagtccgtggctcgccctcctcaacatggtttttgccatgggcagcatcactggcatgaagtcagatgattacaatcacgtcaactactacaaccgcgccatggaacatctgcctctcgatgccttcggcagcagccatatcgaaaccgtccaagctttggctctcatcggcggttactatttgcactacattaaccgtccaaacatggcaaacgccgttcttggcgccgccatccgcatggccagcgcgctgggactccaccggggagagtctggcccagagcgccagggaaatgcttgtgaactggtatgccaacctgccgtggctgttgcgcaccacagacccgtgtgcagacccctctatattgctcgatgcatcatgaagtggcgctaccagaacctccgcatgctgctgcaccgtccggttcttcttagcctcgccagcaacaccagcagcggcgtcatgcttgcccacgttgcggaacaggacatcgctgccattgagacctgtcgtgagctcgccaagcaaaccatcgaggatattgctcgcgagtggactcgcaaccaaatgtcaggctggaatgcagtctggttcctttaccaagctgccatgatacccctaatcagcgtcttctggcagtggaacagccctcgcgtatccgagtggcacaagcagatcgagacaattctagaccttcttgaggccatggaagattggtccctttctgctcgccgcagccgcgaggtggtctggcgtatgtacgaggcttcacgccagcccagcatgcgctccgagagccagagccagagccccgttcttcacgccatgggcagcaacgaacacggcagcattctcatggccgccgaggcggagcttcgcatgtcccctatcggcttggagccagagggcatgggtatgatgggcatgctcgatcagcaaggtctttgggacctcgacggaatgttctggggcggcgcctcaggagactcctcgactgacgcccaaagccacccgcaccaccaacagcaacaacctggcagcgtcgactttggcagcttcagcgtcaacgagcagatgatgcacatggactacaacatgattggcactcccgcttccgcagtgaccatggacggtggcttctttgtccactag

SEQ ID NO: 157 - DNA, 1944 bp, Nectria haematococca
catgcttgcgtcgagtgtaagcggcgcaaaatacgctgcgatgggaaacaaccatgtgatcgatgtcaatcaaggcgctctcaatctcgctgcgtctacgaccaccatcgccaacggatcgtcccctcaaagagagttctcgatgagctttcccagaacttacaagactgccgctctgtcctgagtcggctcttcccaggacacgacgtgtcatcacttctcccgctctcgcgtcaggagctctgccaacttttggaccagccatcatcgcaatcgacagagcctatagaaacccttccatcaccagccctcagcatgtcgaaaattcagctgctcgacgtccaacaaatcccggcgggagatacagagtgggatgaagaacgacgagagcgagatcccttaccagcggaagctgacgatgtcaatggcctgtccctcaccctggacagacaagcgtcatatctcggaatatcatctatcaaagcagctttcggggtcatggtcaagatacaaccgcaattaagaacttcacttgcatctctccaacggaatggttccaagaggaccttggagctcccttccccccagacaggtcaacttgaggagacggccccaatcccctggacgtggaaaggacagctactcattgacaactatttcaagggtctccacgtttttacgcccatgcttgacgaagtttccttccgcgccgactaccttggcggccaaagatgcgatgcgccttggctttcactgctcaacatggttttcgccatgggtgctatcatggcgacaaagtcgagtgacctagaccacttcaagttttacgagaaagctatgaagcaccttagcatgggcgcatttgggagtagccacattgagacggttcaagcgttggctctgctcggaggctattatctccattacgtgaaccgccccaacatggcgaatgctatactgggcgccacaatcaggatggcgagtgcacttggcctacatagagagccaatggctggcgacaacataaatactgcgctagttgagatgcggcgacgcacttggtggtccttgttctgtctcgatacttggaccaccacaacaatgggtcgtccgtcgttcggtcgttgtgatccctcgatcgacattcaacctcctcagataagtatcgatcaggagcgagactctgctcagcacgcaggaatcatgcctctgctagaaaacatccagttttgcaagattgcaacgcagattcatgacatgctggcagccacctctcagcagaccgcagaaagcctgcaacacctggacggcttattggtcggctggtatgacaagcttccctctattcttcgtaaccgggagagttgcgctgagcccctacatctcgctcggtgcgtcatcaagtggagatacttgaaccttcggatgcttctttgtcgcccaatccttctcgctgtagccagcagcgacaaagatgcgccaataagtgaagatgatcttgctgcgatagcaacctgccaggaacttgcaaggcaaacgattgatgatgtcgcgagtggctggacgaagcatcagatgtcaggatggaatgcggtctggttgctttatcaggcagcaatgatacctctcctcagtatcttgtggcagccgcaaagcccatctgttgctgattggcaggctcagatcgaaaagactctggaagtcctcgaggcgatggaagattggtcgctcacagcgcgttgttcacgggacgtggttaagcggatatatgaggcgagccgtcagctttcaggccagaatgaaggcgtttctgccgtagagagtgaccgtttgccagaatttatggaggaggacttctatgcttgggcagaagggctcgagttggaccatatggtaaatatgttggatcaagagtggcaatgggatatagggccagggcagtag

SEQ ID NO: 158 - DNA, 1962 bp, Nectria haematococca
atgtttcacacattttcaagccagactggagatgatcctttgccgccaggtgccgagccggaaccccctgtgcgaaaagtcaacagcgctctagacaaggccacggaaacgcttcgacgtcaagccggtgttctacaactactatttcccaatcacaggcttgatgaattggtcgacaaggatcgagctgatctcatccagcttatttcgccaaaaccaacacgggaccacgtcaacgaagagagaacgctacaatcacctgacccactgcccacgactgggtcatctgggctatcaggggacattgaagatgtaccaagctcgcccgaggatttgagcataggtgaatcaggcgaggaggagaggcgctggcatgagtcggctcaggatcccgcgaccatcgcagccagcgatgacatcaacgccctcagcctggctggtgaccaacatcgccgctcatatctaggaattacatctgtgagcgcagtgctgaaatctttgtttcgactttgtccaactgcgaaggatcttgctgtcgaacagtcccagacctggcctggcgtttcggaagatgagactcgaccgctcgtgctaaaccgtacgcctggttctcttgcggcgcccgattctctgcgtgagcaacgctatcttggcttctactttgagcacattcatgccattacacccttaatcgacgaggactcgtttaggagcactttcactactggcggtgggcaaagcccggcgtggcttggtctctgcaacatggtccttacactaggctccattgcttcgggaagcgacactgcccatatccactactaccaccgggctcgctcgtacctcgatctcgactcacttggttcagggaacctggagagcctacaggcgctgtgcctacttggcggatactacctccattatcgcaactcgcctaacatggcgtatgcaatcttgggcgctgcacagcgcttagccatcgccctgggtttgcacagagagtctccgatccgtgctgaccacaaagactccgaagcaggccaacgttatgtggctcggatcgagactcgaaggcggacatggtggagcctttactgtctcgatacgtgggccagcatgaccttgggtcgcccaacctgtggacgatgggacaccaataccatgaacacattgccacctacgcttctggggcccgatgatcactgtgcggtatccctcagagagagctcacggatgtgccatatctgcaatcgtcttcaagaccgatttgcccagtctacgcgaatcgatactcacgaagcaagggccttggattctgaactacagagctggtacgactcgctacccgccatactcaaggacacaaccgatgcccctcctcgcatcaccgtcgcacgcgagttcttgcgtaacagatattatagtgttcgcatgatcctatctcgatgctttcttttgtatcgcgcccacgaagatataaaaaggcacactcctaacccggcagagagccaaatgatcgacctgtgcagagctgttgcagcagaagccatcgatgctattgcacttcattgggtcccgaaccgaatccaagtctggaactcggcttggtacctgtttcaggcatgcttagttcccctcctctccatcgctatggagacatcatccaactcttcagactctgagccggaaaccgtcatggcctggcgcacgatgttgaacaaagccttggaagttttcgtggacatgaagccgtggatgcgggcttctgaccgtactccagatatcgtggctgtcctattccaggctgtgtcacagggcgccgagggaatcattcgcacgccatcggtgactgacgcaggggcacatgtatttggatgggctgatgaacagtggacagagatggattggagtttgtttcttggcgacgaagatatttctcacaatctgttttcttttacataa

SEQ ID NO: 159 - DNA, 2401 bp, Coccidioides posadasii
atgttccatattttcgaaggattcgagaatcccgataaggcccggagtcagagccgcgagggccgtggcaagagcggaaaaagatcctcgacggtgcgtgcctgcgaacaatgtcgacgccgcaagattcgctgcgatggagagcagccgtgcgaggcgtgccagtggtataaaaagactgatctgtgtcattactcggatcctcgcccgtccagaaggtatccacttcctgttttcattcgttcattctcgctgaagtcttggcatgtcgaaaagctatcttccaccgtcgaggagtatcgagtcgtgtttgagaaactctttccgtccattcctttgcaatctctctccaacctcccccgcgaacgccttctagagctggcctcgagaacccaaccgcagtccgaaattcttcctgttcccgtgtccaagcccccaccgtctgtcgataaccatgtcctccctctccccccagaagatgaaaacctggaatccctccagacaatgcccgatgattccaccgagagtcgtacatgccggagcccagatctcgtcgccgctgtgtccgacgatgtcaacgcgttgtccttatcaacaaaacggccctcaacatacttggggatatcttcggtgaatgctgttatgcgggtaataatgtggattgatcccgagagctctcagcatttctccagggctcccgatccgcaacccctcccaaaacgggagaagcaacctctcccggataactgctcttggtccttgcagcccccaccttccacggctgggcatctggaagtaaatcccatggagcttaccaacgcgtacttcgcatacttccactccttcgctccattgctggatgagcacttattccgcgaaactgtcctggttcgtaaaaggtccgatccgcgttggctagcactccaaaatattgtttttgcacttggaagtattgctgcatacacggccgatgatacatcccacgagtcctactatctaaaagctagacactatttgagtttggatacccttgggaatccgcatttagagaccatccagacccttgccttaatgggaggccattacttacattatatgagccaacccaaccttgcacattctcttatggcagttgctctgcgtatggccactgttctaggtctgcataaagaattcattggaaatcaggaagctgctagtcaaaacagccaaagaaaattctctgtcgatttacgaagaaggatctggtggtctctcttctgccttgacacttggggctatatgacgttgggtagaccaagtatgggacggtggggccctggaattacagccaaactcccacataaccatggaaacaaggaacttgccttttatgcgctttccttagtagaaaacactcggttttgcaaaatagctactcaggtgggagacgctcttgcagcttctccgattgtcagctatcaagaaatggtcagtctcgataatcagttggtcgaatggtatgacaatcttcctccgctcctaaaggatcatgaacccagtgcagatccggtttctacaacgcgaaccgtgatgcgatggcggtatcaaagccagcgtattcttcttcatcgtcctgtcttgctaagctacgcgatgcgtcgtatcccctatgttgcactcagaacagaagagagatatgctattgaaagatgcaggatggtcgctaatgaaacaattcgggatgtcgcttcaactactcgcttgaaccaaatgacaggatggaatgctgtttggctcctcttccaagccacactagttccgctccttgggctttttattgctgatggaaccgccacccatgcgcacgcaacgtcggatagctgcagaaaccaagttgaaacggcgattgttgcccttgagcgcttggagaactggagtccaactgccaagagaacgttggaggtagtctctcgaatcctagaaactagccagcgaccacgccacaccagcgtcggcagctgtacatctggaagcgacacccacacagccggcatgagtgatcagtctgccaccgcttcatcggaaacatcaaacaccgcgccttctattcacactatggaccaaacagccgtccttagcaatgctgcgttccctagttaccagaatattgcaccatatatacagccatcaccgcagcaaatgttggattatattacatggggggataataacatctggtcgagcgtccaagaggatttttatactcaacaaccccccgctgtggggatgtttggccagggtcaacagtaccttaagcctcttgatcatgaacctcccgcggttggagaaagggctggagtgtatgataccggattagagactccgaatattgtacggttttagttaagcggtatataat

SEQ ID NO: 160 - DNA, 2316 bp, Aspergillus oryzae
atgttccacacctttgaaggattcgaaaacccgaacaactcggccccagtccggggtcgtggtgagcgccagccatccgtcggccgacgtgtcactacccttcgtgcctgtacatcatgcagacatcgcaagatcaagtgtgacggtgaaaagccgtgcgaagcgtgtcggtggtataagaaagccgaccagtgtcattatgcagatccccggccctcccgcagacatgtagaaaaactctccaccactttggacgagtatcggggcgtgctcgagaaactcttccctaatatccaacccgaaaatttagttagcttgcctcgcgaaaagcttttggagctgatgggcaagccatccctgctgcagacacagccgccacacccagcgtcaccagctacctcggcatcggtcgaagcccatgtctcccccgtctccaacgaagatggcaatttggaatctttgcagacgatgcctgaagaatccagtgattctcaaaactcgggttatacggagatatccaataatttttcggacgacgtcaatgctctgtcactctcatccagacagccctcctcttatttgggcgtgtcgtctatcaatgctgttctcaaagtgattctctgccttgaccctggcgccctctcttacttctctcatccctcgaccaacacagactccagggactcagctctaggatactccccagcagaagcacaaccatggccggtccaagagtctcagcaaccaataacgccccctcaaccacatcgaccagtaacagagatgcagttgctcgacgcctactttacttattttcagccattcgtgcccatgctagatgaggaagttttccgcgaggtctatcactcggggtgtagaaaggatgaacgttggctggcactgctgaacattgtgcttgccttgggtagcatcgcagcatgtccatcggatgacatgtcccacacaatttacgcccagcgctgtaagagctacttgaatttagaatcgcttggatcctcacatatagagaccatccagactctcggccttctgggagggcagtatcttcattatgtcagtcaacccaatctggcatattcgctcatgggagctgcgctgcgcatggctgcagctttgggcttgcacaaagagttttcagataaccaggaagggtcgtgtaagcagaacatatattcgactgacctgaaacggcgagtgtggtggtcgctgttttgcttggacacttggggctgtatgactctggggcgaccgagtatgggacgatttggaccgacgattaccgttaaactgccgcagtaccgagaaagagggaatgttctcgacattataccgcttctagaaaacgttcggttctgcaaaattgcgacacagatccaggaaattctggctgccgctccgttgacgaggtaccacgagatgtcgcactttgataatcaactgttagagtggtatgagaaccttccgtatatactcaaagaccacgagccatgctccgaatcaattatcatcaccaggacagtcatgaaatggcggtactacaaccagcgtatgctcatataccgtccaactctactcagctacgccatgcggcgggttccatatattgctctccgttccgaagagcggacggcgatcgaaaggtgtcgacagatcgcggaggctacaattcaagacatttcttcaacggcccagtcacatcaaatgtcgggctggagtgcagtctggctcatattccaggcagtcatggttcccctattgggattgtttctcaacgacaacacaacgagtgaccctagagctactgttgcgagctgccaatctcaagttgagatggctatgcttgtcctggcccgactggaacaatggagcccgactgcaaaaaggacgttgggtgccgtatcgcagatattggaagctagtaagagagggactaacatggccaacgaggctggccttgtcaatagcatgtttgctgtctcacgcgagggggcagtgcctcgagccgcttcagggtttcatccgtcccaaaacattttccttcagaatgaggcaggctttgatccgtttgcgcctccagttattgacgactcgacggctcagtacctatgggacttcttgagctggagcgatagcagcctatggcctggaataacggacaccaatagcttcaacgacgaaacgctgttcgcccaaacagacaaaaccatgaaatatcccaacaacggtgcagcctttatggggggctctatgggagacggtgcctactatgcaaatccacctttgccctactactaa

SEQ ID NO: 161 - DNA, 2364 bp, Pyrenophora teres
atgtttcatactttccagtcgtcagtcagcgtgcgctcgcccggcggggacagcgacaacgccgcgaggccctcacgcccaccaggatctcggcggatatcgaccagcaacgcatgtgtcgaatgcaggagacgcaagatccgctgcgacggcacacagccatgtgggcagtgccaatggtaccaacatcccgaggcttgtggctactccaagcctgcccaaagagtggtgcccagcagaaaactagttgacaaactctctaacaatttggatttgtacaagaccattctgacaaagctgtatgggacacaaaatctcgagtctctggccactctcccacgggaagagttgctggagctggccttgtcctctacagtagccaactcaacaacgtcaccatcagcccccgactcccaaacttgttccgaagcacaggctggctctgatggagccgaaagtctagaagcgcttgagcaggctccccccgaagatccttactgggatgaggcacggaagcaccagctgcgtgtccaaggcatctctgatgacgtaaacggtttgtcaatgtctgttgaccgtctatcgtcttacgttggtgtttcttcaataacggcagcattgaaggtcattgtacgatgcgcacctcaagcacgatcttttatttcaaataacaaccaggaaacagccctaccaagccgagcaagttctccaccacccggactcacagacgacagaccagacgcactaccgcctccggagcacggacagcaactcattgagagttactttgaccgtgtacatcctttcttccccttgatcgatgaacgaaaattctggtctactttcctctacagcaatcgtagcgactcaccatggctggcactcttgaacatggtctttgctctaggctcgctttcatctcaagctgccgacaatgaggcccaccatatctactttactcgctcacgaaagcatctgtctttggaatcgttcggaagtggcaacctagaggtactccaagctttagctatcatgagcggatactacatgcactatctcaatcgccctaacgaagcccactcgctcatgggtggtacgctacgcatggcaactgcgctaggcttacatcgcgagtactcggaaagaagcgatgcaagtcaacaagccaagagtgtgaatgaggaagactcaatatcccccgagatgaggcgacgcatatggtggagtctattctgtctagactcgtgggcatcaacaacaacgggcaggccttcgttgggacgaatgggtccctcgatcacggtcatgagacctggcactgcagcaaacgccgtccaaactataccgccacccaacagtcctcaatacatccagcaactcaagattctccctataattcacgcatcggcattctgccagatcgcaaccaagatccaagaccgtcttgtcgaatgtcccctcctgtcttcggtggaaatggctagctacgacgcacagcttgtaaagtggcacgaagacttgccttctattctgtccaaaactgatgaaccatgcccaaacttcctccgccgtacccggttggtgatgaaatggcgattccaaaacatccgcatcatacttcaccggcccatgctcctgaccacagcactccggcacgcctcatgggcgagccttagtgcagatgaaaaggtatcggtaggaaaatgtcggctcgttgcttgcaagacaatcgaggacataagccgggactgcatgcccgatctcatctcaggctggaacgcagtctggttctgcttccaagcctgtatggtcccacttgtatctctcttcagcgaccccagtgtacctgaagaggtagaaaagtggaaggccagtatcgagacggcactgaacttctttgaggcggtcaaagattggagtatagccgcaaagaagagtaaagatgctgttgcgcgcttatacgccgcgtacaagacacaagcttcgacactatctcagcgaacacaaaccccagtatcgcatatgccctaccctcaacagtatcaacaaccaggccacactcagatacatacacattttcccgtacctggcacatcaaatggccctgccatgattaacccacaaacgacaaactatggacagcaacaccaacctccgttcattcaatacaaccccgcaacgcccggttgggtaaacactggcaacgacccagctattctaaacaacttctgggacgatatgatgtgggacaccaatctaccagacatgttggaaacccccttcggaattgcaactgattacgagtatgtgggtgcagcacaggaccccgggcccggtggggcatgttggatgcatggcaactaa

SEQ ID NO: 162 - DNA, 2412 bp, Sordaria macrospora
atggcaccgtcaatttcgatacccacacaaggcggcatgtttcacacattccaaggagtaacaccacgaaagccatccgttgactctcaagatagtgtcaagtccagtggtagtggggcagccaaaaggataactactcctcatgcttgtgccgagtgcaaaagacggaagatccgatgtgatggtcaacaaccatgcggtcaatgtctctcgagccgagcaccgaagcggtgtttctacgacaagcaccgccaaagggtgatcccctcgcgcaagacactcgaagccctctcccagtccctcgaagaatgtcgatcaatcctgaagcgactatatcctaaccaagaagtccacgccctacttcccttgtcaaggcaagaactcctcgacctcctagaccgacccgttccagataacgcggggaacgggctaccgtctcctcccctaaacacaacatcgatggccgacttgaattcaccaatcaagtctgaaaacattttggaacagattccgacccgggatacagaatgggacgaggaacgccgcgagagagaccacatccctgcagaggcagatgatatcaacgcactatcgctgtcggtggacagacaagcttcctacctcggagcctcatccatcaaggctgctcttatggttatgctcaaggtccaaccaggattgaggagctccttggccgccccgctcaacagtgtcgagatttctcataacttcccggccatcagacagaagtcatcgactcaaaaagatccccagcgaatcccgtggtcgtggaagggacagacacttattgatgcctacttcaagcgagtccatgtcttcattccaatgctcgacgagaccaccttccgcgccgattaccttgaaggtcaacggttcgacgcaccttggttggctctactgaacatggtctttgccatgggtagcattgtggcaatgaaatcggacgattacaatcatgtcaactactacaaccgcgccatggagcatcttcccatggattcttttggcagcagccacatcgaaactgttcaggcactggcactcattggcgggtactatcttcactacatcaaccggcctaacatggccaacgccgttttgggtgccgccatccgcatggcgagcgctctaggtctccaccgtgagagtcttacccagggaggaagtgatatggtcgctgctgagaccaggagacgcacatggtgggctcttttctgcctcgacacctgggccaccacaactatggggcgtccatcttttggccgctggggacctgctatcaacattcgtcctcccgagttcggagtaaattccggccgggattcgtctcagcatgctggtattctccccatgatcgaaaacatcaagttctgcaaaatcgccacccagatccaggatatgctcgccatttctcccttgctacgtactgaagaccgctgcaatcttgacgggcagctcgttgcctggtacaacaacctaccctggcttctgcgcaccactgacccttgcgctgagccgctctacatggcccgttgcatcatgaagtggcgctaccagaaccttcgcatgcttcttcaccgaccagtccttctctctatggcctcgtcgggtcttaacccccatacccaggcctgtgattcggacctggccgcgattgagacatgccgtgaacttgctgcggcgaccattgaggatattggccgtgaatggacacgtaaccagatgtccggctggaacgcggtgtggttcctttaccaggctgccatggtccctcttgtctctatcttctggcaatggggcaacccacgcgttcctgagtggctcaagcagatcgaggcggttctggagttccttgaagccatggaggagtggtcgcttgctgctcgcaggagcagggaggtggttcttcggatgtacgaggccagcagagtcatccaagcacagggcgccgcggcgcatcaactacagcagaggcgttcgcagagccctcactctgtcaacggcaccgggcctttgggtatgcacatcaacaccgacttgctcatggggtcaccggattcggctgagctacacatgagtcccatcggcctggagcccgtcgaaggcttgggcatgatgggtatgctggaccagggcggcatgtgggacctcgacggcatgttctggggccccagcccaagcccacctcatcatggccatcacccaactcacccggatgatgcggtggccacggcggcggatttcgctgcagcgttcccgacggctgatggagcagatggacttctgcatcaccattcggctatagaatatggaaacttgatgggtcaccaccatgcagatgcacatactggccagggtcagtttggaggtgtggatgggtacagctactga

SEQ ID NO: 163 - DNA, 2346 bp, Magnaporthe oryzae
atggcgccggcaacatctccagcccctacccagggcatgttccacacctttcaaggtgtcacacctcgaaagcaaacttccgaggctcctgggagcccaaaagctgccaaccccgtcagcaattccaagcgcatcaccacacctcacgcctgtgccgagtgcaaaagacgcaagatccgatgtgatggacagcagccttgcggccaatgcttatcaagccgtgcccctaagaggtgtttttacgacaagcacaggcagcgggttatcccatcaaggaagacgctagaagcactttcccagtcattagaggaatgtcggtccatcctcaagaggctatacccgagccacgatgtccagtctctgttgcctatgtcccgtcgtgatctccttgatctgctcgatcgtccaatactcgacacaactgctgcagctcttccatcaccgcccttgaacacctcgccgctcagtgacgaaattcagccccctctcttcatcaagccagaccaggttctttcgagtctcgagcagatgccatccagggacgcggaatgggacgaagagcgcagggagagagacgccattccggcagaggccgatgatgttaacgcattgtccctcaccatggatcgacaggcttcgtatcttggagcttcatctatcaaggcggccctgatggttatgctcaaagttcagcctggcctgaggagcactctctcggccccgcttaacactggcgagatgccacacaactacccgtctaccaagtcgagggctggcacccacaaggacccccagcggatcccatggtcctggaagggccagacactgatagatgcctttttcaagcggattcatgtcttcatccccatgctggacgagacaacattccgtgccgactatcttgagggccagcgcttcgacgccccttggctagctctgctcaacatggtgttcgccatgggcagcattgttgccatgaagtctgatgattacaatcacgtcacctactacaaccgcgcaatggagcaccttccaatggatgcctttggaagcagccacattgagaccgtacaagcccttgccattattggtggctactacctgcactacactaaccgccccaacatggccaacgcagtgctcggcgctggcatcaggatggcgagtgctcttgggctccaccgagagtctctgacacagagtgcaggcgatgtgcttgtggctgagactcggagacgcacctggtgggcgttgttctgtttggacacatgggcaactacaaccattggtcgaccatcttttggtcgctgggggcctgctatcaacattcgggtgcccgaatttggcatcaacgctgcgcgcgactcaacacaccatgcaggcatcctgccaatgattgagaacatcaagttctgcaagatctcgactcaaattcaagacatgcttgccgtctctccactcctcaggacggatgaccgctgccacttggatgctgccctggtcgactggtacgccaacatgccgtggctccttcggacgacggacccctgtgcagagccgctttatattgcacgatgtgtcatgaagtggcgataccagaaccttcggatgcttttgcaccgatcagtgctcttgagtcttgcctctagcggctcgactcacgcagcggagcacgacattgcagctattgaaacctgcagggacctggcacagcaaacaattgaagacattgctagagaatggacccgcaaccaaatgtctgggtggaacgcagtctggtttctgtaccaggcggccatgatcccattggtatcagtgttttggcagtggaacagcgcgcgagtgcccgagtggcacaagcagattgagaccgtcctagaactcctcgatgcaatggaagactggtctcttgcagcgaggcgcagtcgcgaggtcgtatttcgcatgtacgaagcatcacgcaatctgcagaggcagcagcagcaccaccgttcacagagcccggccgactctactacctcatcacatcacatgggcatgacgggcgggcgcacctccccaagattgattatcggcccctcggcagatactgccgttgagatgccacacatgtcgccgatcggcatagtcgaccccgaaagcattatgggaatgatgggggtctcggatcagcagagcctttgggatctggacggtatgctctggggacagcacgacgaatttgacgccggcgcttatggattccacgataacatgatgatgagcatggattacaacatgatgggaaacgacatcccagccacgacggccgcagccttggaccacggctatccctacgtccattag

SEQ ID NO: 164 - DNA, 1992 bp, Gibberella zeae
atgcgggggcaggaagaagctttcatcccttggattgacaagtatggggaacttctgcgcgtctgtggcattcatgagaatgtaggcacatcagaatacgcaaggccattctccacagtcacgccaccttttatctcaagcctatcgactgatctcatgtctcctcacgcacatcgaatgagaaaagaagtctacgcgcatgcgaagattgcaagcgccgaaagaacacttgaagacttatccaaaagtctcgaggaacgcgattccattttagctcgcctttttccaaaccgagatatatcagatcttgtttcattatcggaccaggaacttcgtgatattgtcttgaacgctggtcctagtcctaatggcacgaccttgacctttcggtcggatcatacaccaaacgaatcgattactcaagactcgcaatgggatgaagatcgacgcgaacgtgatcctttacccgccgaagctgatgatgtcaacgctttatcccttccgttagaccgtcaggcttcttacctcggtatatcatccatcagggcggctcttggagcaatacttcagatgcgacctcagctacgtgcttcactcgcatctcggcaggagtcctacaatgaaacttcttctttacgcgataacggtatgcagtgtactcagatggttcagtctccaacagagaatccttgcgttaagtggagtagaaagggacaggcacttgtcgatgtatacttcaagcgaatacacataatgactccattgcttgatgaaacatcctttcggacaacctacctcagtagtaatcggcatgactcgccttggcttgcactgctgaacatggtacttgccatgggcagtattgcagctagcaagtcaagtgatcgggaacactacaaatactatacaaatgctatgcggcatctagatattagtgcctttggcagcagtcagatcgaaacgttacaagcacttgctatcgtcggaggtcactatcttcactacatcaatcgacccaacagaggcaatgctatcttaggtgcggctttccgtatggctagtgctcttggttttcatcgcgagccatcagaccaagacaaagaaggtgatcagctccaggtcgtggaattgagacgccgtatctggtggtgtttagtctgcttagatacgttagcctccatgaccttgggtcgaccatcttttggccgcttttgtccttccattgatatccaaccaccaaagttcagcaccggcgggcatggacagctggactcggagcctgacatggatataatgctactcgccgagaatattcgcttttgcaggatcgccactgagattcaggacaagctcaccgtcactccttttctcaaaccctctgaccgggatcgattcgatgatatgttgatcagttggtttgacagtcttccatcacttcttggtgacgatcaagagtgcgatgagctggttcaccttggtcgatcattactggacgctgcatcaaaacctggcgtgtactctcagccagccgaccaagatgccatcgaaaaatgtcaactgctttccaagacagctatcgaggatatagctcagagttggaagaacgatcagatgtcagggtggaatgcagtatggcatctttaccaagcagtcatgattccactactgagtatggtatggcagcctcagaaccctgcagtttcggaatggaaaagccagatcgaaatggtgcttgggctatttgaaagcatgcgtgattggtctttgacggcacgttgtagtaagagggttgtcagtcagatctacgaaacaatcccaatctgctgcaacgctgaacgtcttcaactcggaagcttcgacatggagaggagcagccacatgattaggctgtcccactcctcgcagtaccgtgactcgagttttatggaaagggtcaaggtccttctcattaacctcaaaaccgccgaagcccttaaaattgggtcaagttag

SEQ ID NO: 165 - DNA, 2322 bp, Aspergillus nidulans
atgttccacaccttcgagggcttcgagaatccagccgcctcggcccccgcccgtgcaggacgagaacgccagtcttcaatcgggcgtcgcgttaccactcttcgtgcttgtacctcttgtcgtcatcgcaaaatcaaatgcgatggtgaaaagccgtgtgaagcatgtaggtggtataagaaagccgatctttgccattattcggatccccgtccctcgcgaagacatgtcgagaaactgtcaacgaccttggatgagtaccgaaccgtactggagaagctgtttcctggcgcatcgccggaagccttggctaatttgccgcgcgagaaactgctcgaaacactagctcagccccaggcgcagcctccaagtactggagcccgccagatatcgccagcaacgtccacctcccacgaggcgcacgtctccccgatatcgaccgaggatggaaatctggagtcgctacaggccatgccagaagaatcgaatgacccccgcaatctcagcagcgagatcacgaatacaatatccgatgatgtcaatgcgttgtcgctttccacaagaggcccgtcctcgtacctcggtgtctcgtccataaacgcggttctcaaaacaatcgtgtggctggatccagggtccgctgcatattttgccagtacgcccccaagcgctcctcgtcgaggctcggtagcagacctctcttcgtcggaggggcagtcttgggctgcccatgaccagcccggtactcctccgcaagttcatctacaagtgccagaatctcaactcctggatgcttactttacctatgtccagcccttgacaccaattctggacgagcagtcctttcgcgaaacatacgctgctggacaccgaaaagatgaccggtggtattgcttgctgaatatcgtcctcgcgatgggcagtatctgcgcctcaacctgcgacgatatttcacataagatatattactcccggtgtagggcgtacttggacctggagtcgctcgcgtcactgcacctggaaaccgtgcagacgcttggtattctagggggctggtacctgcattacgttgcccaaccgaatctagcgtactcacttatgggcgccgctcttcgcatggctgccactatgggtttgcatagagaattcgccgaccaatccgatacatcgaacaagcagaaaatggcacaacttgatctcagacgacgggtatggtggacactgtttcttatggattgctggggaggcgtgactttgggacggccaacaatgggccgattcagtcccgcgattacggtcaagcttcctcactatagggaatcggggaatgtacttgatattcttccgcttctcgagaacgttcgattttgcaagatcagcaatcagatacaagacgcgctagcagtgtctccattgaccaaatacagtgaaatactccacttcgatactcaattggttgagtggtacaacagcctcccatatatccttaaagaccatgaaccatgcccggaaggaatcgcaaacacccgcgaagtcacgaaatggcgatatcatgtccaacgcatactcctctaccgtcccacactattgagctatgccatgcggcgggttccgtatattgctctacgatccgaggagcggacggcgatcgaaaggtgcagagaaattgccgaaaccgccatcagagacatctcggcaactgcaaagacccctcagatgtctgggtggaacgccgtgtggttcctcttccaaagcaccatggttccccttctagggctgttcatcaacgacaatacagtgacagatccccgggctactacagaggcgtgccaagcgcaggtccaagacgctttacttgtgtttgcgcgtcttcagcaagcaagtccgacggcaaggaaaaccctcgacgcagtttcacggatatttgaggccagcaaacgtggtcccggcatagctgccgaaaccaacagcatcaacagcgctaatctctccccaacttcgcgcgaggctggtgttcttaacacacccggaatcttaccctctcacaacgatggacgaggatttgcagttactcacgacagctcgttcaccgatccattcgccccttcaaccatggatgaccctaacggtcaatatctctgggacttccttagctggagcgataccaacatagtcccaatggcagacgtggaaaatatcaacgacggcggcctgctaggctccgatgacaagcatttcaagtatacgaataccagcttctttggcaaccagctaactgaaccgccttttttcactaattcatctattccatattattcgtga

SEQ ID NO: 166 - DNA, 2115 bp, Aspergillus nidulans
atgttcatcgccttcgaagctaccaaggacgccaacgcctcaaaagacctcgaatcaggccctcgtaaccccaagagcgtgacgggtcgaaccagtactggtagacgcggcgtcgtacctcgagcttgctcttcctgtcggcgtcgcaaagtcaagtgtaatggcgagaagccgtgtgaggcgtgccgatggtacaagcggcctgaggagtgtacctatccagagtacgaacggctacgaaatatgaaatcgagcccgtcgcctgattaccgcagcaccctgacaaggctcttccccggcacggcgccagagcagcttgtcaatctaccacgcgagaaactgctggaactgatgaccggcagcgcttctcagatgcaagactcgccctccacgacagcctctgtaacgactggggtttccgtgatgccaatcgagagacccagcctggaatcgctgcattccatccccagagacgagctgggcgaaatccctaatgttccgtcagcctcgtccagcggtcagatctctgacgacgtcaacgctctgtcgctcctggctcgaccacctacgtcctatctaggcatctcatcggtgcaggccgccttgaaagccattgcgtggaacctcccagggtacaatttctcaatttctccgacagtcccccggcaacagcccgaagagccactcagtccgctctcgactacgctcgccacgcttcaatttacagagacacagttggtagatgcatattttgctaattttcattcattcgcaccgctcttagacgaggatgcgtttcgcaaaacgcatcgagccggctatcgacaagatgcgcgatggctggcattacgcgacactgtcctagctttgggcagcattatcgctgccgtggacgtcaacgacagaacgcattgtacttatttcgagagtgcaatgagccgtctgaacctgggttcactgggtaatccgagccttgaagttgtacagactttgggcctcatgggaggctggtactgccattacaccagccaaccgaatctcgcatattccctgatgggagcttccctgcggatggcgcttacattgggccttcaccgggagctgtgcgacggccgttccgtgcatgacccggcccaagcggcgcacgaggagttccgacggcgcgtctggtggtcactctgctgtctcgagatctggggtcaggagacgctggggaggcctgggatggacttcttcacggcaagcattacagtcaatacgcctcggttgatcgataaggacaactatatcgagatcgtaccgttgattgagaacgtcgagtttgtgaaggtcgcctcgaaaatccaggaatcgctagctacaccaccggctttgacgcatacagagatgtgcgacctggacacacaactcctgcaatggtggaacaatctgcctccgatcctcagggactccgagccgtaccccgagagcatctattccgtccgcacggtgatgcgatggagattgtatacccaacagatgctcctgtaccgccccagactcttgaaccagaccatgcgccgcattcctttcctcgctgtgcgagccgacgaacgcactgctatccgaaggtgtcgtgaactcgcagagacggtgatcctcgatatcgcccagacgacgagcatgaatcgcatgataggctggaacgctgtctggttcatattccaagcgacaatggttccgctgatctgtctctcgggcatccctgtagacaacgacctggaagcttcggctgactcttgcaaacgccaagtggagactgcaatcctggctcttcagcgaatgagaccttattcacccacggctggacggaccttcgaggtcatctcgaatctttttggtgccatccttcagggtaccggtgaccccccgccggacgcagacagcgacgctcctatggacatggccatgcccgagagagtcccggtggcaaacgactacaatagcgagcaggccccacgcagtcggcctgtcgatgaggcggcgggattcttcgacaacttgccgccggagtacggctataccagttttggcaccccagtcaccaggtgcctggatatgtctatcatcccatga

SEQ ID NO: 167 - DNA, 2214 bp, Aspergillus fumigatus
atgtttcacacctttgagggttttgaaaaccctggtgcctcagctccggctaagggacgggagcgccagcagtccgttgggcggagagtcaccacccttcgggcgtgcacctcatgccggcatcggaaaatcaaatgcgatgacgagtatcggagcgttctggagaggttatttcccagcacctcccccgaggcccttgtcagtctaccccgtgagaagctcctggagctgtcgggtaagggcccgccgcagccacatgcacaacatccggcttctcctgccacctctgcgtcagttgaagcgcacgtttcccccatatccaacgaagatggcaacttggaatcattgcagacgatgccagaagatcccagcgacagccgaaaccagagcaccagtgatattgcgaatgaaatttcagacgatgtaaatgctctatccctctcagctaaacagccatcctcatacctaggcgtgtcatctatacacgctgtcttgaaagtcatcgtctggcttgatccaggatctctctcttatttctctcggacgccagcgagtgctgctccccgagagtcaatgcatgattactcaacatcagccgagcatcagaactggcacatccaatcgtctcagcagcgaccggtcacaccacccaaggctcatatgcaagcgaccgatacgcagctgctcgacgcatacttcacctggttccagccgtttgtgcccatgctggacgaacaagcttttcgcgagacgtacctgtccggacaccgcagagacgaccgctggctcggacttttaaacattgtctttgccttgggaagcatagcagcatgcccgtccgatgacatatctcacaaggtttattaccagcgctctaaaagctatctaagtttggattcattaggatcctcgcacctagaaaccatccagactttggggttgatgggcggttattatctacactatgtcagtgagccaaatctggcttactcactcatgggagctgcgctccgcatggcggccgccttgggtttgcataaggagttctcctacaatcaggatgcgtccaacaaacagaaactttcagccatggatctgaaacgccgaacatggtggtcgttattctgtatggatacatggggtggaatgactctgggtcgacccagcatgggtcgtcttggtcccaccatcacagtgaagctaccaaatcacagagaagctggaaacattctggatatcctccccctgcttgaaaacgtccggttctgcaagattgctactcagatacaagaggttctggctgtcgcaccgttaacgaaacatgccgagatgtctcaactggacaatcagctgttggaatggtacgaaaatctgccctccatcctcaaagaccatgaaccatgctccgaatcgatttcgaacacgcgaaccatcatgcgatggcggtattataaccagcgcatgctcctgtaccggccgaccctgttgagctatgctatgcggcgagttccctacatcgcgctgaggtcggaggaaaggaccgctattgagaaatgcagagaagtggccgacgccaccattcacgatatctcctctaccgcccagtcgcatcaaatgtccggctggaacgctacctggctcatctaccaggcaacaatggttccccttctgggtctgttcctcaacgacgccacagcgagtgatctcagagcatctgtccaatcgtgccagtcgcaggttgagacggcgatgatggtattggcacggatgcagctctccagccccgcagcgaagcggacgctggaagccgtctcgagaatactcgaagccagcaaacgaggctctgatatgggaggcgcagcgagcggtctcgccagtgggagctgcgcgcaggggcgcgaaagcaacatttcgggaatgatgcctggattagtctcagcactgaccgaacccggccggggtgttgcgattgcgaatgacggtggaatggtagaaccaatggcaccgccattcatggacgagacgaccggccagcaactgtgggattttctcagttggagcgattcaaccatcttgtctggattctcggagtttgataacccgaacgacataaagtgcgacggcaatgcgcctggcctctatggcagtcctatgaccgattcaacatattacatgcatcaatccgtgccattttactcgcttggtcaaccataa

SEQ ID NO: 168 - DNA, 2115 bp, Aspergillus fumigatus
atgttccacacctttgcacttcgccacagcaacccgcgcgcagcgacgggagaagaacggcgaggcagacgaccaggattacgagcctgcaaggaatgccgtcgacgcaagatccgctgcacagggacgcatccttgtgagccgtgtctatactacaaaaagccggagctgtgtcgctattcagatcccagagtgccacacatcgggacgcgaggaaatggttcccatgccgatagtcagtatctgtctgttttggagagactgtttccttcagtctcgttgcagtcgcttgcctctctgacgcgcgaggagctcctggatctgttgcgagatagtatacttggctcggatcggcccccttcgcagcctccggagggtgcggaggaccactcacgatcgtctttcgaggcgatgtcaacgggaaatgctgacagcggtgatgtcaatgctgtcaatgacaaggctgatgtatcggatgatgtcaatgcgctctccatggctacgcgtccgccgtccacctacctgggcatctcgtccatcaatgccgtcctcaaggtgatcagctgggtcaatccggagtcaatagctcgaccgttcactacagctcccttgagaaacaagcctcgaccgaaagcgcaagtgtcaagacccccatcaaccgactgccatgcccccgaccaactcatcgacgcctacttcaacttcatccatcccttcatgccgctcctcgacgaaaccgacttccgacagacctacgtatccaacaccaggcgcgacgagcagtggctcgccctcatgaacatggtcctcgccctaggcagcatctccttctaccccagcgatgacaccacgcacatcacgtactgcaagcgcgcgcaccaacacctctccctcgaatccctcggcagcgcacatatcgagaccgtccagaccctcggcatcatggccggccactacctacactatatcagccagccgaacctggcgtacgtgctcatcggagccgcgattcggatggccaccgcgctgggtctccacaaggagaccgcagacacggacgccagcgagagcagaccgctccagtcgtcgtctgtgcccgtcgacctgcgccggcgcatctggtggtcgctctactgcctcgatacatggggctgcatgaccctcggacggccaacgctaggccgcacatcgatggccgtctcgacaaagccgccagcgagcacacccgacaccctcatcctcgtcgaaaacatccgcttctgccagatcgccacccgcgcccaggaagccctcgccgcatcccccctcccgccctacgctcaactccacgacctcgacaccgagctagcagactggtacgcgcagctgccgccgctcctgaaaacgtacgaaccatgcccggactcgatccataccgcccgcaccatcatgcgctggagtctgcataacctgcgcatcctcctctatcgcccattcctgctccggtatgccctccgccgcgtccctgccatcatgctccccagcgacgagcgccccgccatcgagaagtgccagcagctcgcgcgcgacgcgatacgcgatattgccgagacgcaggtgaagagtcccgcggctgcgtggggggtgatctggcacgggttccaggcgagcctggtgccgttgttaaagttgagtatccttgccgcggaggccgacggacacgatgtggacatggagatggtggagtcgtgcagggagcagcttgaggccgccatggcagctattgagcgcgtcgaggcgtggcagcctactgcgcggccgagtctggatcttattgcgggcatctttggcgcgtcgatggcgaggctggagttgatggcagtgtcgacggcctcgtcggatgggcgcacgtctcctgttgccccggagcggggatatccagttgaactacagcccagggtcagggtccaggtcccgcagagcggacctatggcgtatatggagagtgagctaggcgtggtgagtgaggatgtttgggatcatattagttggatgagtcccacggcgtgggatgatgggcaggggcaggccagtgtaatggacttgtggtccacgccggggtggtggcagctttga

SEQ ID NO: 169 - DNA, 2127 bp, Aspergillus niger
atgtatcgatcaagcaggcatgtggagaaactgtcgaccacactcgatgaattcaggggagtgcttgacaagctcttccctggcattccagcggagaccctggtcaacttgcctcgggacaagcttctggagctgacaggcaaggggccttcccagatgcagacgcaagcgccacacccggcatccccagcaacctcggcatcggtagaggctcacgcatcgccagcatccagcgaagacggcaatctcgagtctctacagacaatacctgatcacacaactgatgatcgtgaattgaaaggttctgagctaacgagtaccgtatccgacgacgttaacgctttatctctctcggccaaacagccatcttcctatttgggtgtctcttccatccatgctgtgctaaaggtaatagtatggctggagccgagctctctctctcatttgtctcgcgcacccgccacaggagtccgtcgagaatctgtcatggacattgcatctccagaggcccaggcctggcaggtttttgggtcacagccccatcatggcacgtccacccatagcccactccaggttcccgagactcaactgctcgatgcttacttcacctacttccaaccttttgttccaatgctggacgaacaatattttcgccaaacgtatctttctgcgcgcaggaaagacaagcaatggctcgcgttacttaacattgtctttgctttgggcagcatagcagccaccccggccgacgacatgtcccatcaagcatattatatgcggtctatgagccatttgaatttggaaagccttggatcaccacacgtggagactatccaagctctgggcctcatgggtggctattaccttcactatagcagccaacccaacctcgcgtactccatgatgggagccgcgttgcgcatggcggctgctctggggctacataaggaagtgtcagatggccagtatggcaatggcaggaataggctatcttcagttgaccataaacgtcgggtatggtggtctcttttctgtctggacacgtggggtggcatgaccttgggacggccaagcatgggtcggctgggtccagcaatcaccgttaagctaccacattacagagaaacaggcaatgtgctcgaccttctaccacttttggaaaatgttcgcttttgcaagatcgcgacacagatacaggaggtcctggccgtggcaccgctgacaaaacctcacgaaatggcacatcttgatagccagcttttggaatggtatgataaccttccttatattcttaaagaccatgagccatgctctgagtcgattgcgatcacgagaaccgtcatgaagtggcgctattacaaccaacgcatgctcttgtatcgccccaccctgctcagctatgccatgcgccgcgtaccatacattgtgctcaggtctgaagaaaggacggcaattgaaagatgtagggagattgccgaggctaccatacaagatgtagccgccaaggcacaattccatcagatgtcaggctggaacgcagtatggcttatcttccaggctgctatggtccctcttctaggcttgtttctcaatgatggtacggttgatgatccaagagcgacagctgaagcgtgccaggctcaagtggaaacaacaatgcttgtcctggagcgcttggaaccttggagtccagccgccaaatcaacgctcgaggctgtttcccgaatatttgaggctggtaaacgtggccccagcgtcatcggggaagcccacagcattaacagcggtagctgtgtaacgtctactgaagagactcttggcgcagttcctggggtatctccgatgcaagtcgactttggtcgcgctattccacacgacagtggatttgtcgacccatttgaaccccagtttatcaatgattctgctggacagtatctatgggactttcttagttggagcgatagcaacttgttgcagggtttggctgatattgacaatgtcaacaatggaccactgtttccccaggaggagagaaatgcaaagtatggatccagcgacactgcgttttttggaggccaattgggagattcaacattttttatcaattcagggccgtccttctactag

SEQ ID NO: 170 - DNA, 2931 bp, Leptosphaeria maculans
atgcagcccagtcgcatgttgcaaactgccgccacgtacgacgcaggctcaacctcgacccggactctggatgacttcgttgtgctggtgttcatgccggcagaagcacctcgcgaagaagagattgcgtgtgcgcggattgtaccgtacgtatcggggacctacacaatactagcagtgctggcgcatgatgaggccagccatgtttcgttgtttcgtggccatgaatcgccatcttccaagggccgttcttctggagaccttctcgaacgcgccgccaacatgacatatgctgattttcaatgtcaatctcgcttggctttgcgaggcaactcttcccgtccgcccgtctccaacggtcgcctgtctctgctcgtccaccaggcttatgacgatactgctccggctctgggaacgagaggcgactttcctctgacaatacttcggcctgcagatgacatgcccactaccaaaactctaccggccgctctgatatatcaaccctgcatcgttggcatcgccaatttgaccgaacaagagaaggtctgggtagtcgacacaggcgacttcgacacgtcgtcttgcagcacgagtcaacacgacatgttccacactttccagtcctctgccgcaatgcggtctcccgatgcagacatagatgcttcaggcaaaccatcgcgccccccagggtcacggcgcatatccaccagcaacgcgtgcgtcgaatgcaggaggcgcaagattcgctgcgatggctcgcaaccctgtgggcaatgccagtggtaccagcaccccgaggcatgtgggtattcgaaacctgcgcagagagtggtacccagcagaaaactagttgacaagctgtccaacaacatcgagcagtacaaagccgtcttgacgaagctgtacggaggcaggaatctcgagtcattggcaaatctgcccagagaagagctattggaactggccctctcctcaccctccatcacattgacgacatccccttccacgacagaatccgtagccctgtcagacgtccaggcgggatcggatggggctgagagtctggaggcgcttgaacaagctccacccgaagatccttactgggatgaggcacggaagcaccagctccgtgtccaaggcatttccgacgatgtcaatgggctatccatgtcagtcgaccgcctctcgtcctatgttggaatatcttccattacagcggcactcaaagtgattgtaagatgcgctccacaagcccgcctgttgattgcgcacaacagccaggaaaccgcgctgccgagccgtgcggggtcaccgccgcccgaacttgcggacaataacccgcttgctgttccatcagcacagcacggccagcaacttattgaagcgtttttcgaccgggtccaccctttctttcccatgatagatgagcgcaagttctggaacacgtacttgtatggtgatcgcaaagactccgcatggctcggcttgctcaacacagtctttgctttgggctcactttcctcgtcgactgcagacaacgaggcccactatgtctacttcacccgcgcgagacagcatgtctctctggaatcttttggaagcgggaacctcgaggtcctgcagacgttggcgattatgagtgggtactatatgcattatctaaacagaccgaatgaggcacattctctgatgggtggcaccctgcgtatggctactgctctgggcctgcaccgtgaatactctgaacgcagtggttcaagtcggaagttcacagcggctggtgaggaggactcgatctctccagaaatgcggcgacgcatatggtggagcttgttctgtcttgattcctgggcttctaccaccactggccgcccatctttgggtaggatgggaccttcaatcacagtgatgagacctggcaccgcgcccaatgcggtacaaacgattccgccaccagacagccctcagtacatcgaacaactcaaaattctccccctaatccacgcttctgcattctgtcagatagccactcggatacaagatcgtctcgtggaaacacctttactctccttggctgagactgcagctttcgatatgcaaatcctcaagtggcacgaggaactaccctcaattctctctgatctcaacgaaccatgtccagactttctgcgccgagttcgaactgtcatgaaatggcgctttcaaaatattcgtcttgtgctccataggcccgtgttacttacaacggccttgcgacgcagctcttggaactctctaagcccggaagaaaaggtggcggttggaaagtgtcgtatgatcgcggccaagacaatccaggagctgagcaaggagtgcatggctgacctgatcagtggctggaacgcggtatggttttgcttccaggcctgtatggtccctcttgtctcgctgttcagcgactgttctataccggaagaggtgaagaagtggaatgaaagcctggaaaccgccttgcaattctttgaaacggccaaagactggagtatcgctgccaagcgaagtggggacgctgtcacaaggctgtatgccgcatacaagacctatgcatctacaatgctttcacaaccacaagctcccatgcagacggtccagcctcattaccaggattccaacaactttgcactcccaggcaccgtgactacaagcagtatgctgaatacacatcaaatttattcccaagcccagcccgcattccaatacaacccgtcaacaccaacgtgggcaaatgcaaatgatccaaccattctgaacaacctctgggacgacatgatgtgggacacaaatctcccggacatgctggaaacaccattcgggctgaacaacgactgggagtatgcatcaacggcgcaagactcgggctcaggtggggcatgctggatgcatgggaattga

SEQ ID NO: 171 - DNA, 2214 bp, Aspergillus fumigatus
atgtttcacacctttgagggttttgaaaaccctggtgcctcagctccggctaagggacgggagcgccagcagtccgttgggcggagagtcaccacccttcgggcgtgcacctcatgccggcatcggaaaatcaaatgcgatgacgagtatcggagcgttctggagaggttatttcccagcacctcccccgaggcccttgtcagtctaccccgtgagaagctcctggagctgtcgggtaagggcccgccgcagccacatgcacaacatccggcttctcctgccacctctgcgtcagttgaagcgcacgtttcccccatatccaacgaagatggcaacttggaatcattgcagacgatgccagaagatcccagcgacagccgaaaccagagcaccagtgatattgcgaatgaaatttcagacgatgtaaatgctctatccctctcagctaaacagccatcctcatacctaggcgtgtcatctatacacgctgtcttgaaagtcatcgtctggcttgatccaggatctctctcttatttctctcggacgccagcgagtgctgctccccgagagtcaatgcatgattactcaacatcagccgagcatcagaactggcacatccaatcgtctcagcagcgaccggtcacaccacccaaggctcatatgcaagcgaccgatacgcagctgctcgacgcatacttcacctggttccagccgtttgtgcccatgctggacgaacaagcttttcgcgagacgtacctgtccggacaccgcagagacgaccgctggctcggacttttaaacattgtctttgccttgggaagcatagcagcatgcccgtccgatgacatatctcacaaggtttattaccagcgctctaaaagctatctaagtttggattcattaggatcctcgcacctagaaaccatccagactttggggttgatgggcggttattatctacactatgtcagtgagccaaatctggcttactcactcatgggagctgcgctccgcatggcggccgccttgggtttgcataaggagttctcctacaatcaggatgcgtccaacaaacagaaactttcagccatggatctgaaacgccgaacatggtggtcgttattctgtatggatacatggggtggaatgactctgggtcgacccagcatgggtcgtcttggtcccaccatcacagtgaagctaccaaatcacagagaagctggaaacattctggatatcctccccctgcttgaaaacgtccggttctgcaagattgctactcagatacaagaggttctggctgtcgcaccgttaacgaaacatgccgagatgtctcaactggacaatcagctgttggaatggtacgaaaatctgccctccatcctcaaagaccatgaaccatgctccgaatcgatttcgaacacgcgaaccatcatgcgatggcggtattataaccagcgcatgctcctgtaccggccgaccctgttgagctatgctatgcggcgagttccctacatcgcgctgaggtcggaggaaaggaccgctattgagaaatgcagagaagtggccgacgccaccattcacgatatctcctctaccgcccagtcgcatcaaatgtccggctggaacgctacctggctcatctaccaggcaacaatggttccccttctgggtctgttcctcaacgacgccacagcgagtgatcccagagcatctgtccaatcgtgccagtcgcaggttgagacggcgatgatggtattggcacggatgcagctctccagccccgcagcgaagcggacgctggaagccgtctcgagaatactcgaagccagcaaacgaggctctgatatgggaggcgcagcgagcggtctcgccagtgggagctgcgcgcaggggcgcgaaagcaacatttcgggaatgatgcctggattagtctcagcactgaccgaacccggccggggtgttgcgattgcgaatgacggtggaatggtagaaccaatggcaccgccattcatggacgagacgaccggccagcaactgtgggattttctcagttggagcgattcaaccatcttgtctggattctcggagtttgataacccgaacgacataaagtgcgacggcaatgcgcctggcctctatggcagtcctatgaccgattcaacatattacatgcatcaatccgtgccattttactcgcttggtcaaccataa

SEQ ID NO: 172 - DNA, 2115 bp, Aspergillus fumigatus
atgttccacacctttgcacttcgccacagcaacccgcgcgcagcgacgggagaagaacggcgaggcagacgaccaggattacgagcctgcaaggaatgccgtcgacgcaagatccgctgcacagggacgcatccttgtgagccgtgtctatactacaaaaagccggagctgtgtcgctattcagatcccagagtgccacacatcgggacgcgaggaaatggttcccatgccgatagtcagtatctgtctgttttggagagactgtttccttcagtctcgttgcagtcgcttgcctctctgacgcgcgaggagctcctggatctgttgcgagatagtatacttggctcggatcggcccccttcgcagcctccggagggtgcggaggaccactcacgatcgtctttcgaggcgatgtcaacgggaaatgctgacagcggtgatgtcaatgctgtcaatgacaaggctgatgtatcggatgatgtcaatgcgctctccatggctacgcgtccgccgtccacctacctgggcatctcgtccatcaatgccgtcctcaaggtgatcagctgggtcaatccggagtcaatagctcgaccgttcactacagctcccttgagaaacaagcctcgaccgaaagcgcaagtgtcaagacccccatcaaccgactgccatgcccccgaccaactcatcgacgcctacttcaacttcatccatcccttcatgccgctcctcgacgaaaccgacttccgacagacctacgtatccaacaccaggcgcgacgagcagtggctcgccctcatgaacatggtcctcgccctaggcagcatctccttctaccccagcgatgacaccacgcacatcacgtactgcaagcgcgcgcgccaacacctctccctcgaatccctcggcagcgcacatatcgagaccgtccagaccctcggcatcatggccggccactacctacactatatcagccagccgaacctggcgtacgtgctcatcggagccgcgattcggatggccaccgcgctgggtctccacaaggagaccgcagacacggacgccagcgagagcagaccgctccagtcgtcgtctgtgcccgtcgacctgcgccggcgcatctggtggtcgctctactgcctcgatacatggggctgcatgaccctcggacggccaacgctaggccgcacatcgatggccgtctcgacaaagccgccagcgagcacacccgacaccctcatcctcgtcgaaaacatccgcttctgccagatcgccacccgcgcccaggaagccctcgccgcatcccccctcccgccctacgctcaactccacgacctcgacaccgagctagcagactggtacgcgcagctgccgccgctcctgaaaacgtacgaaccatgcccggactcgatccataccgcccgcaccatcatgcgctggagtctgcataacctgcgcatcctcctctatcgcccattcctgctccggtatgccctccgccgcgtccctgccatcatgctccccagcgacgagcgccccgccatcgagaagtgccagcagctcgcgcgcgacgcgatacgcgatattgccgagacgcaggtgaagagtcccgcggctgcgtggggggtgatctggcacgggttccaggcgagcctggtgccgttgttaaagttgagtatccttgccgcggaggccgacggacacgatgtggacatggagatggtggagtcgtgcagggagcagcttgaggccgccatggcagctattgagcgcgtcgaggcgtggcagcctactgcgcggccgagtctggatcttattgcgggcatctttggcgcgtcgatggcgaggctggagttgatggcagtgtcgacggcctcgtcggatgggcgcacgtctcctgttgccccggagcggggatatccagttgaactacagcccagggtcagggtccaggtcccgcagagcggacctatggcgtatatggagagtgagctaggcgtggtgagtgaggatgtttgggatcatattagttggatgagtcccacggcgtgggatgatgggcaggggcaggccagtgtaatggacttgtggtccacgccggggtggtggcagctttga

SEQ ID NO: 173 - DNA, 2226 bp, Glomerella graminicola
atgttccactctttcgacagtcgccggagcccctcggcatcggcagccgccgctccgactctgccccggaaagtcaaccgctcgtgccaggagtgcacgagacggaaagtcaaatgcgacggtggacacccttgcgccagttgccagtactacaaagtggcagactcgtgcgagtataggcagcggagcagacggcacgctgtgagcaggagcactcttgaaaagactgcagagaagctccgcgaccagtcccgtgtcctgcaggaactcttccccgacgtctccgtggacgacctgctcggcaagagtcgggcggaactgctcgcgttgctaccacgagactcgctctctggtacacgtcccgccgttccacaggccggcctcttaccagctggtgtcgtctcaaccgctgctccggaagaagacgggaacgaggacgaggacgatgttccagacgacccgacgcagctctccgagagcggggaagccgccaacgacaggcgctgggaggagtccgcgcaccagcccaccaccatccgagccagcgacgacatcaacgccgtgagcctggcgacggaccagcaccatagttcctacctcggcgtcacctctgttagcgccgtcctgagagccatcttccgtctctgccccgccgcgaaagagcacacggcccagcgcgtcaagacgtggaacgacgcccaaaatcaatcccagctgctgccgtcgctgtcccccgccggggccggggccggccagaaccctctgcgcgagcggcgctgcatcgtgttctactttgaccacgtccaccccatcaccccgattctcaacgaggacgacttccggcggacccttgcctcgggggcccgccacgacggctcttggctggccctcctcaacatggtcttcactctgggctccgtcgcttccggcagcgactcgctgcacctacactactacaagcaggcacgcgcccacctcgacatagacttcctcggctccggcaacatggagagcctccaggccctctgcctgttaggcggctactacctccactaccgcaactcccccaacatggcctacgccgtcctcggcgccgcccaccgcgtcgccatagccctcggcctgcatcgggaacccgcccctcgcagccgcatcgccgacgaacgccccgtgagcgatgcggagcgcgatacccgcgtctcccgcgccgagacacgccgccgcacctggtggggcctgttctgtctcgacacctgggcgagcatgaccctgggccgtccgacctgcggccgctgggacggtagtactatggacacgctcctgccggcgtcgttgttccctgacgaccacgtcgccgcatcgctgcgggccagctgcatgttctgtcacatatgtgaccggatccagcaccgcttcgcccagcacgcccgcttgtccgcccaggaggccttggccttcgaccgcgagctcagggagtggcacgcctccttgcccgagtacctgcgtgacccggcgaactccccgccccggctggcgatggcccgcgagttcatgcgcaaccgttacttgagcgtgcggctcatcttgtcacgctgcttcctgttgtatctcgcccaaagccacggcctcagacgcggtgccgcgtctgtctccagcatcgctgagccctctgccgaagatatgatgctagtcgacatatgccgctctgtcgctttggaggccatcgatgcaataacgctctactggatgcccaaccgcatccacgtctggaactcggcctggtacctgttccaggcctgcatggttccgctgctgtccatcgccatcgagactaggcaccgccactcgtcctgccagcaggagagaccggccgtccgcccgataccttcactggccactgccggcatgcctccggtagcacccctggccacatggtgcgcgggcctcaccaaggccctcgaggtcttcgccgagatgcgcccctggatgcgcacctcggactacaccccggaaatcgtcgcggcgctctacgaggctgtcaccgccgagattgaagaacccggagccgccgtcgggcccgccacccgcacaccctcagccacgacggacggcagcatggacctgttcgagtggtgcgacgagcagctcgcggaactggactggggcacatacctcggcgtcggcggcgaagatgggatgcatcagcgcatgtttgccttcttctga

SEQ ID NO: 174 - DNA, 2256 bp, Glomerella graminicola
atggccccgtcgattccagtttccactcaaggtggaatgttccatacctttcagggagtaacgccgcaaaaacaaacgtccgatagccaggaaagcggaaaatccgccggctccaacacttccaagagaatcaccacacctcatgcgtgtgctgaatgcaaaagacgaaagatccgctgtgatggccaacagccgtgcggtcagtgtctttcaagccgggcccccaagcgctgcttttacgacaaacaccgacagcgcgtcatcccttcaagaaagaccctcgaagccctgtcacagtcccttgaggaatgccggtccatcttgaaacggctgtttcctaaccaagacattcaatcgctgctcccgctctgccgccaggaccttcttagtctgcttgaacgccctgtacttgttacggcgactgcgcttccatcaccgcctctgaacaattcccctctctcacaagagctggaatctcctgtttgctccggctccgagcgaggcttctccagcctcgagttgatgcccggccgagatactgagtgggacgaagagcgccgcgcacgcgaccccatccccatcgaggccgatgacgtgaatgcgctttcgctatctgtggaccggcaatcgtcatatcttggcgcctcttcgataaaagcagcactgatgtgcctgatgaaggtgcagcctgcactccgaaactcgctcaccacgccgctccacagcgccgaagtcatgcataacttcccaagtttgcgtcagaagagcgcggtaaccaaggatacgcagcgcgttccctggtcgtggaaaggccagacgctgatcgatgcctacttcaagcgcatccatgtattcgtccccatgctcgacgaggccgcctttcgtgccgattatttggaaggccaacgatttgacggcccttggctcgctcttctgaatatgatattcgccatgggcagtatcgtggccatgaagtcagatgactacaaccacatcaactactacaacagggccatggaatatctgccaattgacgcttttggcagtagtcacattgaaatggttcaggctttggcactgattgggggctactatctccactacatcaacaggccgaacatggccaatgctgttctcggtgctgccatcaggatggctagcgcccttggacttcaccgagagagcctagctcaaggttcaagtgacgtggtcgccgccgagacccgtcgccgtacttggtggagtctgttctgcctcgacacttgggcaacaacaacaatggggcgaccctcgtttggtcgatggggccctgcaatcaacatcaggccgcccgagttcggcgtcaaccagacccgagactcttctcagcacgcgggcatcttgccactgattgagaacatcaaattctgcaagattgccacccagatccaagacatgctggcgatttcgccccttctgcgtacagaggatcgttgcaaccttgacggtcagctggtcaactggtacagcagcctcccatggctcctcaggacgaccgacccctgcgctgagcctctgtacattgcgaggtgcgtcatgaagtggcgatatcagaacctacgaatgctgctcaaccggccggttctcctcagcttggctagcaacggctccctctcacaggttggagagcaagatattacggccatcgagacgtgtcgcgaaattgccaagcacaccattgaggacattgcaagggaatggactcgcaaccaaatgtcgggatggaacgctgtgtggtttctctaccaggctgccatgatccctctggtcagtgtgttctgggagtggaacagtccacgtgttcccgactggcaccagcagatcgagacaatcattgatctgctagaggctatggaagactggtcattggcagcgaaacgtagccgagaagtagtgtggcgaatgtatgaagcctctcgacagccatccgtgcggtcagagagtcctctgcaagggatgagcagcgatcaaggcttattgttggcggaatcagaactgcacatgtcacccattggcctggagccggaagggatgggcatgatgggcatgcttgatcagcatggtctatgggatctggacggcatgtattggggccaaagccccgaccagagtgtggactttaccccctacaccgtcaacgagcaaatgatgcacatggactatggtatgatgggcagtcagactgcaacaatagggggtgacttcttcatccactag

SEQ ID NO: 175 - DNA, 1881 bp, Coccidioides posadasii
atgcccgatgattccaccgagagtcgtacatgccggagcccagatctcgtcgccgctgtgtccgacgatgtcaacgcgttgtccttatcaacaaaacggccctcaacatacttggggatatcttcggtgaatgctgttatgcgggtaataatgtggattgatcccgagagctctcagcatttctccagggctcccgatccgcaacccctcccaaaacgggagaagcaacctctcccggataactgctcttggtccttgcagcccccaccttccacggctgggcatctggaagtaaatcccatggaacttaccaacgcgtacttcgcatacttccactccttcgctccattgctggatgagcacttattccgcgaaactgtcctggttcgtaaaaggtccgatccgcgttggctagcactccaaaatattgtttttgcacttggaagtattgctgcatacacggccgatgatacatcccacgagtcctactatctaaaagctagacactatttgagtttggatacccttgggaatccgcatttagagaccatccagacccttgccttaatgggaggccattacttacattatatgagccaacccaaccttgcacattctcttatggcagttgctctgcgtatggccactgttctaggtctgcataaagaattcattggaaatcaggaagctgctagtcaaaacagccaaagaaaattctctgtcgatttacgaagaaggatctggtggtctctcttctgccttgacacttggggctatatgacgttgggtagaccaagtatgggacggtggggccctggaattacagccaaactcccacataaccatggaaacaaggaacttgccttttatgcgctttccttagtagaaaacactcggttttgcaaaatagctactcaggtgggagacgctcttgcagcttctccgattgtcagctatcaagaaatggtcagtctcgataatcagttggtcgaatggtatgacaatcttcctccgctcctaaaggatcatgaacccagtgcagatccggtttctacaacgcgaaccgtgatgcgatggcggtatcaaagccagcgtattcttcttcatcgtcctgtcttgctaagctacgcgatgcgtcgtatcccctatgttgcactcagaacagaagagagatatgctattgaaagatgcaggatggtcgctaatgaaacaattcgggatgtcgcttcaactactcgcttgaaccaaatgacaggatggaatgctgtttggctcctcttccaagccacactagttccgctccttgggctttttattgctgatggaaccgccacccatgcgcacgcaacgtcggatagctgcagaaaccaagttgaaacggcgattgttgcccttgagcgcttggagaactggagtccaactgccaagagaacgttggaggtagtctctcgaatcctagaaactagccagcgaccacgccacaccagcgtcggcagctgtacatctggaagcgacacccacacagccggcatgagtgatcagtctgccaccgcttcatcggaaacatcaaacaccgcgccttctattcacactatggaccaaacagccgtccttagcaatgctgcgttccctagttaccagaatattgcaccatatatacagccatcaccgcagcaaatgttggattatattacatggggggataataacatctggtcgagcgtccaagaggatttttatactcaacaaccccccgctgtggggatgtttggccagggtcaacagtaccttaagcctcttgatcatgaacctcccgcggttggagaaagggctggagtgtatgataacggattagagactccgaatattgtacggttttag

SEQ ID NO: 176 - DNA, 1956 bp, Metarhizium anisopliae
atgcagactcttgcgagttccgccaacgctccaggcggaatgcccacttttgacaagacatccgagcagctcaaattgcaatccaaggttctggagactctctttcccggttccaatctgaaagatctcttggaaaagagtcaaagtgagctcctcgagctactcagcgtaaaccatgtctctccacgcagcaaggtgcatcaactgcctcctcatatgcccatcacgccaggtccaccccccgttcttcctcaaagacgagaacgagaagaagatgaccaatttgcctcgggctcacctgctcaggggtccgcctccgtgtcggaaaatgaagaagcggccgaggaacgccaatgggacgaatctctcgaccaacctgctaccgttgccagtgacgatatcaacgccatcggattggctgcagacaatcaccatgcgcgctcttatctcggcgtaacatccatgagcgccgtattcagaaccatatttcaattgtgccctgccgccaaggagcacaccaacaaatgtgccagatcgctggctgcagtgccctcaccagtatatccgacagtgcctgttaccggcagagacccagcactgagtgttctgcgggaacagcgttttattgacttttatttcgaacatatccatccccttactccactattagatgaacaagactttcgaagtcagtacgcatctggcactcgtcgggatgggtcgtggatgggactcttgaacatggtctttgctttgggatcgatagcttctggaagcgagggtttgcacgagcagtattatcgggaagcccgctcatttacaggattggatagtctagggtctggcaaccttgaaagtctgcaggccctatgtctcctcggcggatactacttacactatcggaactcgcccaacatggcctatggcatcctcggtacagcccagcgggtagccattgcgctcggtctacaccgtgaaccccgcagggccatggagacaccagaccctggcgaaatggaatcatgtcgaaggcgtgttgaaaccagaagacgaacatggtggtcctttttctgcctcgacacgtgggcttgcatgacccaaggtcgccctacatgcggtcgatgggaaagcagcaccatggacacatactttccatcgtgtctctacccagatgaccaagaggctacattgctccgagccaacattgagttctgtctaatcttcgaacgggcccagcatcgctacgcccagttcagccgtctctccaaccaggagattctagccctcgacgccgaactgcaaacgtggtacaagagcctccctcaagaaacaaaacaagttgacaatgctcctcaaaggttccggtttgcccgagagctattaaaaacgagatactacaacgcccggatcattcttgcgcgatcccttatactctacatggctcacgacttgaagcgtaaacccgcagaacttctccccgagcaaggccacattctcgatcactgttgctccattgccgcagaggcaatcgactccacagcacgatactggtccccgaaccgcattcacgtgtggcattccgcatggtatctgttccaggcatgtaccgtgccgctgcttagcattgcaatcaacagaaatatggaacagcgtcaacagaaacaagtatcatcaccatcatcagacagagtcgtctcttggcagacgagcttggcaaaagcgctggacacatttgccgaaatgcggccatggatgcgaacatctgatcgatccccagatatagtgtctgccttgtacgaagccctgacagctgctggggaagtagacggccaaacgccttctgcgacggacgggagcttggatctgtttggctggtgtgatgatcagcttacagagttggattggagagtgtttctaggtgatgaaggcttggccagggggatgtatccagtgtga

SEQ ID NO: 177 - DNA, 2505 bp, Neurospora tetrasperma
atggcaccatcaatttcgatacctacacaaggcggcatgtttcacacattccaaggagtaacaccacgaaagccggccgttgactctcgagatagtgttaagtccaatggtagtggggcagccaagaggatcactactcctcatgcttgtgctgagtgtaaaagacgcaagattcgatgtgatggtcaacaaccatgtggccaatgtctctcaagccgagcaccgaaacgttgtttctatgacaagcaccgccaaagggtgatcccatcacgcaagacactcgaagccctctcccagtccctcgaagaatgccgatcgattttgaagcgactgtatcctcaccaagaagtccacgccttacttcccttgtccaggcaagaactcctcaacctcctagatcgacccgtcccggacagcacagcgaacggactaccgtcacctcctttaaacacaacaccgatggccgactcagagacaccaaccaagtctgaaaacatattggaacagattccgactcgggatacagaatgggacgaggaacgccgggagagggaccacatccctgtagaggcggacgatatcaacgcgctgtcactctcggtggacagacaagcttcttttcttggagcctcgtccatcaaggctgccctcatggttatgctcaaggttcaaccaggcttgaggagctccttggccgccccgctcaacagtatcgagatttctcataacttcccggccatcagacagaaatcatcgactcagaaagatccccagcggatcccatggtcatggaagggacagacacttatcgatgcctacttcaagcgagtccacgtcttcatcccaatgctcgacgaaacaactttccgtgccgattaccttgaaggtcaacgatttgacgcaccgtggttagccttgttgaacatggtattcgccatgggtagcattgtggcaatgaagtcggacgattacaaccacgtcaactattacaaccgcgccatggagcatcttcccatggattcctttggcagcagccatatcgagactgtccaagcattggcactcatcggcggttactatcttcactatattaaccgacccaacatggccaacgctgttttgggtgccgccatccgcatggcgagcgctctcggtcttcaccgtgagagtcttgcccaaggaggaagtgatatggtcgctgccgagaccaggagacgcacatggtgggctcttttctgcctcgacacgtgggccacgacaaccatgggacgtccctcttttggccgttggggacccgccatcaacattcggcctcccgagttcggtgtgaatgccggccgggactcgtctcaacacgcgggtattctccccatgattgaaaacgtcaagttctgcaaaatcgccactcagatccaagacatgctcgccatttctcctttgctgcgtaccgaggaccgctgcaatctggacgggcagctcgttgtctggtacgaaaacctaccttggctcctgcgcacgaccgacccatgcgctgagccgctctacatggcccgctgcatcatgaaatggcggtatcagaaccttcgtatgcttcttcatcgcccagtcctcctctccatggcctcatcaggtcttaacccacatactcaggcctgtgactcggatctcgccgccattgagacgtgccgagagcttgctgcggcgaccattgaggacattggtcgtgaatggacacgtaaccagatgtccggctggaacgcagtgtggtttctctaccaggctgccatggttcctcttgtctctgtcttttggcaatggggcaaccctcgtgtccctgagtggctcaagcagattgaggcggtattggagctccttgaggccatggaagagtggtcactcgctgctcgcaggagccgggaggtggttcttcgcatgtacgaggccagcagagtcatccaggcacagggtgccgcagcgcaccaactacagcagaggggatcgcagagccctcattctctcaacagcactactgcgtccttgggcagcatgcacatcaacaatgacttgctcatggggtcaccgggttcggcggagctctacatgactcccatcgacctggagcccgtcgaaggcttgggcatgacgggtgtgctggaccacggcgggatgtgggatctcgacggcatgctctggggtcccagtccaagcccgtcggttcaccatggtcaccactcgactcacccggatgatgcggtacccacggtggcggagtacgctgcagcgttcccgacggctgatgtagtagatgggtttctgcaacatcactcggctatggagtttgggaacatgatgggtcaccaccaccatgcaggtgcacatgctggccagggtcagtttggagttgggctggtagcccggggttatgcacagttggcgcgacgcaggcttgaaggaccgaaataccaccacatacgatggctggatgcggccaccggccttacctag

SEQ ID NO: 178 - DNA, 2343 bp, Mycosphaerella graminicola
atgtaccacacctttcaagctgcgccgtcctttcctgcgagtggagacggtagcaaaggaccccgaccacctggtagctcttcatcgaggcgaatctccactacgaatgcatgcatcgagtgtcgacgacgtaagatccgctgtgatggcaatcagccttgcggccagtgtaattggtatcagcatccggagctatgcgcgtactcgaagccagcacaaagagtcatcccgtcgcgaaaactggtcgagagacttcaatcccaagtcgaacaataccactcgctcttcgctcgactgttccccggcaaggaactggagaacatccttacgatgtcgagagaaggcctcgtcaacctagctgtgaccctgccagcggccaaactctctccaccttctgcagaagcccgggaccggcatcaagtgaagtcagagacagtcgaatcagagacagccgacagtcttgaagctctcgagcaggcccccgagcaggactccacatctggcgaatcgagaaagctccacgcgaagatacaggccatctctgacgatgtcaatggactgtcgctgtcaatcgacaaagcttcatcatacacgggcgtttcctccatcaacgcggcgatgaaggttatcctcaagacagcgcctttcgcttgggctttcatttcgcagccttccgcacaaacatccaacccaagtcgcgctactactccaccaccacatgtgcgagatccggacccatattacttgccttccgcggacgtcggcgaaaagctcattgaatcatatttcaaatatgtccacgtacagatgccaatggtggacgaggaacagtttcgacatggctatctgtacggaacacgtagagatccggcctggctgtcactgctgaacatggtgtttgctctcgggtccttagctagttcgacatgcgacaatgaggaacacattgctttcttccagcgagcgaggaaacatctcattgcagaaagctttgcaagcagtagtctgttcgtgctccaagcatttggtcttctgtcaggatactaccttcattggctgaacagaccaaacgaagcaatcgcgatcatgggtgggactctccgcatggcgactgcgctcggtttacatagagagtatggccatggaaagcccgacaaaggcaccggtggagagatatcggcagatatcagaagacggacttggtggacactctacgttctcgactctttgggcagtctcagcaccggaagaccatcccttggtcggagcggaccaggaatcacgactgaagttccaaggatacccgagcagatgaacaatgctcaatacctggcatctctgcgattgctaccgatcatccacaacatttccttttgtaagatcgcaacaaaagtgcaagatcaattggccgcgcgaacattgattgaattcggcgagctgttcgcgatcgatgcggagttggagaaatggcgtgaggacatgcctccaattctgcgagatcgggactggacttcatgtccagaaatgctgaagatcccacgcgcggtcatgtattggcggtatcagaatttacgaattctaatgcatcgaccagtccttctcgcagccgcgcttcgaaagactccatttgccaatatgaaagatgacgaaaggctggctgtcagccgatgccgattggtcgctgggcagtccatctacgatattgacgcgagctgtccggagaatctcatcgccggttggaacgccgtgtggatggtctatcaggcggtgatggtacccctcgtctctctcgaaggctcagctccgttgccagggagcgacgatgatgtcgaaaagtggaagagtgaaatcgaaacggcgatcgcattcttcgaccgcatgaatcagtggtcagtggcggccaggaaaagcagagacgttgtacaacgtctctataatgctacaagtttcatcgatcagcccagcgctcagctgcaccagaaggtgcagaaccgagaacagtcggcgctgccgtcgacggggttgcaacagcaaagcaaaacaatccagcctgcagaggtcgacttttcagctggacggccgattccccttgacccgtcggagtaccagccgcaagaaaacagcgcaaggcagggatgggacgtgaccacgagtagcggagcggcagtcataccggacgagttcttttggaacgacatgatgtgggatacgttgcctcaaaatatgccagatctgccgccgaatttgggcgagggtattgatgtcgtggattggtggcagaatggatatgacactggcccagacgctcagtcctggagccagtggccacaagatggcacgtga

SEQ ID NO: 179 - DNA, 2307 bp, Neurospora crassa
atggatgaggaccgtccaaggaagcgcgtgcgcgtttccattgcctgtcacaactgccgaaatcgcaagtcacggtgtgatggccaacatcccagctgtggtcgatgtaaagagctcgacgcaccctgtgtctatgacgagccaccggcaccacatcaccgcccaaggtcaagcaccacagacactcctccttcggacatcctttccaggttgagtgctcttgaagaccgaatcaatgctagaggtactgaagccagccgtcaacatgctacccaggacgacggcgacgacatcgatgcccaagaagacacgcgcgagtctaatggcagctcgagcaatggaccgctggatccgcctacgatgacagggctcccacgttcacaccaggaaaatgtccatgtcgatggcatgggcgaggttcaactgactgatgatggagagaattgcacatattttggtccttcttccaatgttgccttggtacgccaactttcgctagccttgactcgggctcaaagccaaacctctcgctcgcgagctatgccgacctctgcaacttcactcgcatcttcaaggtattcgtcacttcaacagccgcgttcagagagcggacgacaagatcccttaaatggcggagtcaaagctggatccagacctggccatcatgtccctcccgaaccagaagccaccaacatcattcacgaatacttcagcaccataggccttttcttccccgtcattcatcaagactcattcatgagcacctacaacgacctgcggaagaaagggttcatgggcgctcgccgcgtgtggctggctctgctctacatgatcattgccaccgtgtaccgtaccaattctccctctactccctccgagacatcggccgaaacctcggaaagatactttcagtgggccaaggacctggtcatgccacagttcctgatctcgtccagtttagaaaccgtacaactcctgtgcctcatgatcgagtatcttcatgggtcttcccaatcagcccagctctggaccttacactcgttggccgtcaagtccgctttgcaaattgggttgcactcagccgatgcctctcgacacttgacccttctcgagcgtgagatgcgtaagcgaacgtggttcttgatttttatgaacgataacaacctgagcgccaaattcggtcggcccatgaccatccctccctctcttcagaaacgactggaacccccactagacatcaacgaacattttcccaccatgtacgcaagccgagccgttatcgccacgagcgtagatgcctttaaatgcggtgtccaactctcacatatcacatgtcaattggtatcccagctatacgacgacaacgcaggcggcagctccctcaaccacgtcaacaccttcgacacccttcgtttggcctttgatttctcatggaagttatcccaatggcaccagtctgtaccaccagacttacggcctcaaaacctaactacggaaactcctcctcctgtccttgaatcatcatcatcatcatcatcaccaagcatcgaagcccaacgtctaagagccgttctcggccttcggtactacggtttatgcaccctggtcgagcgtccagttctgctaaagtttctcggattccagccggaacctgggcatgggcagggtgacgtcgacacgaacgtggcactactgcgcgagtccggtgtagtatccctgcggagatgtatacgtgcctgcagagaatgtatagcgcttgcaaaagcgattgtggaccggtggcagaaccagaaggtgctgctttcgggagcttggtggttgactgcttatcatgctttcggcgcctccctaactctctacaccgtcctccttattgccggcacaaagccctccttctccaacctcctcagtgactccgaactcaccacggtgcgctccgccctcagcgacgccgtcgacttactctcccgcttcggcgaaaacagcctcgtcatttcgcggtgccacgattgtctggtgaactttctgcgtgcttatgacttggttgtggtggagcagcagcggcagcagaagcaacaacaggaatcacaatcgacaacagtagcagcaactgtgcagaccagtagaaactctgatcacacttcttcttctcaatcgttgccgccgcaggggcaagggcagggggtgcatgtgaatgtgataggggatggtaacggcgtgtcattgacgtcgtcgtcgtcgtcgtcgtcgtcgtcggggggttactgccatgaggatcaattgccgagcagtccggcagttatatag

SEQ ID NO: 180 - DNA, 2003 bp, Trichoderma reesei
catgcctgcctcgagtgtcaacgccgcaagatccgctgcgacggcaagcagccctgcggccggtgccagtccagccgctcccggaggcggtgcgtgtatgagcagcatcgccagcgtctcgttccgtccaggaagtcagttcaacctcccccatgatgaggtcttcctaactatcttgtccaacttcttttgttgtttggtcttggctaacatcttccaactcgcaagtaagatcactggaagagctgtcacggaatctcgaagagtgccgctccgtgctgcggcgtctctttcccaaccatcaagtctcccacttgctatccttatcacgccaggagctctgcagcctcctagatcagccggcacagcaaaggactgttgacctgtcgccggtcccaccctcgcccaaggatgatcagcagcacccaacggagctcgagcagatgcccgcgcagaactctcagtgggacgaggaacgaagagaccgggacccgttgccggccgaagctgacgatgtaaacgccctgtccctcgccatggacaaacaggcttcttcctatctcggtgcctcgtccgtcaaagtcgccttgaccgtcatgcttcagatccagccccagcttcagctattgctcgcgtcacagccgtctgctgattcttctagtgacgacaacacccgcagcaaggttcctcttatccgtgcagcttccagatccgccaagaagcagtttcctatcccctggacatacaaggggcaagctcttgtcgatgcctacttcaaacgcgtccacgtcctcacccccttactggatgaggcctcgttccgaaaacattacagcgagggtcggcggtgcgatgctccctggctctccctgctcaacatggtctttgccacgagcagcatcatgtcaacgccatcgagcaacttgagccatatcaagtactacaaccaagccatagagcacatccatctcagtgcatttgggagcagccacatcgagaccatccatgccctggggcttcttggaggctactatctgcactacatcaaccgcccaaacatggccaacgccattatcggcgccgtcctcagaatggccactgctctcggtctgcatcgagaaccgccaccggaggagccacagtctgatcctgcggtcgttgagtcgcggaggcgcacttggtggaccttgttctgcctcgacacttggggcaccacaactcttgggcgcccttcgtttgggcgatgggggccggcgatcaatatccaaccccctaaacttgttacggagaatgtaggtcaatcatgaaccttgaagctgggtaaatggctggctgccatctaccgacacttgactcatttctctaaaacacaggaagaatacgactctgcccaattcgggggcatcatgcctttgctcgaaaacataaagttctgcaaaattgcgaccaaaattcaagacatgctcgcagtcagtcctcttctcgagtcagaagatcgacatcatcttgatagccttcttgtcgactggcacaacaacctcccctggcttcttcgatctacggaaccctgcgtagagtcactccatctatctcgaagcgtcatgacatggcggtactggaatctacgcatgcttctctaccgccctgttcttctgacgctggccagcaaaggccagttgcccatctcggagcaagatgtggccgccgtgaagaattgccaggaggccgcacgagagacggtggacagcgtctcaaaagggtggatgcgccagcaaatgtccggatggaatgccgtgtggtttctgtatcaagcagccatgataccgctggtcagcatcttatggcagcccgataaccccgccgttgtcgactggcgggcccaggttgagtcgacgctggagctgttcgaggccatgaaggattggtctctcacagcacgccgtagccgggatgtcgtcagccgcttgctcgaggccagttccaagatttccaacacgagacaa

SEQ ID NO: 181 - DNA, 2301 bp, Phaeosphaeria nodorum
atgttccataccttccagtcttctactgcgctccggtcgcctggtgacgacacggacgtttcggggaaaccatcacggccggcggggtcgcggcggatatcgacgagcaacgcctgtgtcgagtgcagaagacgaaagattcgctgcgacggctcacaaccgtgtggacagtgccaatggtaccagcatcctgaggcgtgcggctactccaagccagcccagagagtagtgccgagtagaaagttggtagacaagctttccaccaatatcgagcagtacaaggcggtactaaataagctctatggatccaaggaccttgcaacactggcgaacctgccaagagaagagctattggagatggcgctttcgtcatcttccacaccggggcaggtgacttcaccaaatagtctagaaggtcgcgccacgtctgagatccatacaggatcagatggcgctgatagcctcgaggcgctcgagcaagccccccctgaagaccctttctgggatgaagcacgcaagcatcaattgcgggtgcaaggcatttcagacgatgtgaacggcctttccatgtctgttgatagactatcctcttatgttggcatttcgtccgtcacagcagcactgaaggtcattgtaagatgcgctccacacgcacgtgctctcatcacacaacaaaccaatgaaactaccctgcccagtcgagccggatcaccacctccagaactcactgacagcagtccattggctttgccatcatccacgcatggccaggaactgctcgagagctattttgaccaggtccatcccatgatgccgctgatcgacgagaggaaattttggtccacctatttgtatggcaacagaaaagactcccaatggctgtgtttattgaacatcgtctttgcgcttggatcattggtgtcttcttcgacagacaatgaagctcactatgtgtatttcaaccgatgcagacaacacctttctttggagtcgttcggcagcggaaacttggaggtcctacaggcactcgtcatcatgagtgggctctacatgcattatctgaatcgaccaaatgaggcgcattcgctcatgggtggcgctctgcgcatggcaactacgcttggtctgcatcgcgagtattcggagcggagcgaagctggtagccacatgatgctaccggggttcgaagaatcactatctcccgagatgcggagacggatctggtggagtatattctgcctcgatgcctgggcatcaacaacgactgggcgaccctctttgggtcgcatggggccctctatcacggttttgaagccagggactgcggctgatgcggtctcgaccgtaccatctccaaacagccctcaatatatggaacagctgaaaatgctgccgctgatacattcctccgtattctgttcgatcgccacccgaatacaagaccgcctagtcgagcaacccctcctatcgccaaccgagacttcgacgtacgacgcccaattgctcaagtggtacgatgaactgccatctattttggtcaaacaagagccgtgtccagatttcctgcgccgtctcagactgatcatgaaatggcgctttcaaaacatccgtgttatcctccatcgaccgtatctcctcacagccgctttaagaggatgtgcatggatcaacatgagcgccgaggaaaaggtggcgattggaaaatgtcgcgttctcgccatgaagacaattgaagatatgagccaggagtgtatgcctgacctactatctggctggaattccgtctggttctgcttccaggcgtgcatggtctctctcgtctccttgttcagcgacgcgagcatgcccgaagaagtacacaaatggcaagcctccatcgagacggctctacaattcttcgattctatccgcgactacagcatcgcagcgaagcgaagtaaagacgccgtctcaaagctctaccaagcctacaaagcctatgcagttccggccacacaaatacccccacaaatatcaatgtcgcaacatcaataccaggctcagaccccatattcgatggccccgaatcctatgcaactcggcgcacatacaaatctcggagcacggaatccttaccagttcaatccaggcaccccatcatggtccagcgacccaaatttcctcaacaatttctgggacgacatgatgtgggacaccaacttgcctgatctgctcgagcatccgttcggactgagcaacgaattcgaatatggcggcgccgcacaggattctgggaacaatggttggctgcaggggaactga

SEQ ID NO: 182 - protein, 758 aa, Trichoderma reesei
MPQPHGPAPGLAAAPATGQRQEPLPFLATALAYTGASGPGPGSVSVSTSGQAHGLGSRSTGSFSINGSGVAGPGAGAGAGAGASTTNAMARHHPHDASSLSLALTPEVDDLDVDADASANGPQSPADAAGLNRRPGKRPAARGTAFYPRKRANTACQVCRARKTKCDNKKPACSYCVSVGATCIQSPVDLSSFDPASLKILDRIDELERLLRHAVPIPGPEAAAPPSSALAPAPTTGFSNHQRLPPLSRSRTFDGIGGAMHAPSSSVSSVSGRRHPDDNMDISLLPQRVDHILQWPVFQNSGSHHHSPASYRAPPDAISTPPSGSASLAGLIDMDSHRIYRLLDNFFLHIHCKNPILDEVLARRMVINAFLDGIDWSPASCLALIICALGCIATPFGPSGETKLGTQTYNDSQIFFQAAQKRIGILLVRSDIVGAQCLFLSGVYLMMVFQPVYAWRFFSQALAACQHFPFLARAQNLNASLDSMEMGRQDTQEQAVYWSAWKSERELRQELDLPDFDILHSGSTLYPPFFPAPPIAPAESPDGPDSETQRARAAWLFYLAEISLRRLTSRLSREALDLRQRYSSDSVLLDMLLDMMPEYEAQIREWSESLPADLSIHTPVEEDGICRSVLRGRMINLLEQIYWPFVMASISAHATRRPVKPAVAEFAKRGLETHMHQVHVNKPGFHHRHHGSMFMIRACTRSALVLLAAAKAGCAMPTDWEDSVYKTVGMLAYWEDEDRDLIHWRSTLERELALTRHE

SEQ ID NO: 183 - DNA, 2277 bp, Trichoderma reesei
atgccgcagcctcacggtccggcgccaggtctggctgcagctccagccacggggcaacgtcaggagccgctaccctttctcgcaacggccctggcatatacgggcgcctctgggcctggtccaggctcagtttctgtctctacttctggccaagctcatggcctcggttcccgttccacaggcagcttctccatcaatggcagtggcgtggctggccctggcgcaggtgcaggtgcaggtgctggtgctagtaccaccaacgccatggcccgtcatcatccccacgatgcgtcgtctctctccttggctctcaccccagaagtcgacgacctagatgtcgacgccgacgccagcgcaaacggcccacagtcaccggcagacgcggccggcctcaaccgccgccccgggaagcgcccggcagcccgcggcaccgccttctatccgaggaaacgggccaacaccgcctgccaggtctgcagagcccgcaagacaaagtgcgataacaagaagcccgcctgtagttactgcgtcagcgtcggcgccacgtgcattcagtccccggtggatctgtccagcttcgaccccgccagcctgaagatcctcgatcgcattgacgagctggagcgtctgctgcggcatgccgtccccatacccggccccgaggctgccgcgccgccatcgtcggctctcgctccggctccgaccacaggcttctccaaccaccagcggctgcccccactctcgcgatccaggacctttgacggcatcggtggtgcaatgcacgcccctagctcaagtgtcagcagtgtgtcgggtcgcaggcacccggacgacaatatggacatcagccttctgcctcagcgggtagaccacatcctgcagtggccggtcttccagaactccggcagccaccaccactcgccggcctcgtaccgcgcccctcccgatgccatctcgacccctccctccggctcggcatcgctggcgggccttattgatatggattcccaccgcatatacagattactagacaacttctttctgcacattcactgcaagaacccaatcctcgacgaagtcttggcacgccgcatggtaatcaacgcttttctggacggcattgactggtctcccgcctcgtgcctggcgctcatcatatgcgctctcggctgcatcgccacgccctttggccccagcggcgagaccaagctgggcacgcagacctacaacgactctcagatcttctttcaggccgcccagaagcgcatcggcattctgctcgtgcgctccgatattgtcggcgcccagtgtctgtttctatcaggcgtctatctgatgatggtcttccaacccgtctacgcatggcgcttcttctctcaggccctggcagcttgccaacactttcccttcctggctcgggcccagaacctcaacgcctcgctcgactcgatggaaatgggccgccaagatacccaagaacaggccgtgtactggtctgcgtggaagtcggaacgagagctacgacaggagctagaccttcctgatttcgacatcctccattccgggagcaccttgtatccgccctttttccccgcgcctccaattgccccggccgagtctccggacgggccagactccgagacacagcgggctcgcgccgcctggctgttctacctcgccgagatctcgctccgccgtctcaccagccgcctttccagagaagccttagatctccgccagcgctattcctctgactcggtactgctcgacatgctgctggatatgatgcccgagtacgaggctcagatccgcgagtggtcggagagcctgcccgctgacctctccatccatactcccgtggaagaggacggcatatgccggtcggtcctccgaggcaggatgattaatctcttggagcagatttactggccttttgtcatggccagcattagcgctcatgccacaaggcgtcccgtcaagccagctgtggcagagtttgccaaacggggcctggagacacacatgcatcaggtacacgtcaacaagcctggtttccatcatcgacatcatgggagcatgttcatgattcgggcctgcacgcgaagcgccttggttttgctagcagccgccaaagcggggtgtgccatgcccaccgactgggaggattctgtttacaaaaccgtcggcatgctggcctactgggaggacgaggacagagacttgatacactggagatcaaccctggagcgagagctcgcactcacccggcacgaatga

SEQ ID NO: 184 - protein, 13 aa, Artificial Sequence
  Synthetic Construct
  VARIANT 1: Xaa = Val or Leu
  VARIANT 2: Xaa = Glu or Asp
  VARIANT 3: Xaa = Lys or Ala or Glu
  VARIANT 6: Xaa = Gln or Thr or Ser or Asn
  VARIANT 7: Xaa = Ser or Thr or Asn
  VARIANT 8: Xaa = Leu or Val or Ile
  VARIANT 9, 10: Xaa = Asp or Glu
  VARIANT 11: Xaa = Tyr or Cys
  VARIANT 12: Xaa = Arg or Lys
  VARIANT 13: Xaa = Ser or Thr or Val
XXXLSXXXXXXXX

SEQ ID NO: 185 - protein, 19 aa, Artificial Sequence
  Synthetic Construct
  VARIANT 1: Xaa = Met or Leu or Ile
  VARIANT 2: Xaa = Ser or Thr or Ile
  VARIANT 9: Xaa = Phe or Leu or Trp
  VARIANT 10: Xaa = Ile or Val or Leu or Cys or Thr
  VARIANT 11: Xaa = Phe or Tyr
  VARIANT 13: Xaa = Ala or Ser
  VARIANT 14: Xaa = Any Amino Acid
  VARIANT 15: Xaa = Met or Leu
  VARIANT 16: Xaa = Val or Ile
  VARIANT 19: Xaa = Ile or Leu or Val
XXGWNAVWXXXQXXXXPLX

SEQ ID NO: 186 - protein, 6 aa, Artificial Sequence
  Synthetic Construct
  VARIANT 1: Xaa = Glu or Asp
  VARIANT 2: Xaa = Any Amino Acid
  VARIANT 4: Xaa = Ala or Val
  VARIANT 5: Xaa = Ala or Val or Ile
  VARIANT 6: Xaa = Ser or Thr or Ala or Leu
XXLXXX

SEQ ID NO: 187 - protein, 6 aa, Artificial Sequence
  Synthetic Construct
  VARIANT 2: Xaa = Phe or Tyr
  VARIANT 3: Xaa = His or Ile or Leu
  VARIANT 6: Xaa = Gln or Glu
MXXTFX

SEQ ID NO: 188 - protein, 17 aa, Artificial Sequence
  Synthetic Construct
  VARIANT 4: Xaa = Lys or Arg
  VARIANT 5: Xaa = Leu or Met
  VARIANT 7: Xaa = Leu or Ile
  VARIANT 8: Xaa = Glu or Asp
  VARIANT 9: Xaa = Arg or Lys or Gln or His
  VARIANT 15: Xaa = Ser or Asn or Gly
AGDXXIXXXLNRIEXLL

SEQ ID NO: 189 - protein, 17 aa, Artificial Sequence
  Synthetic Construct
  VARIANT 2: Xaa = His or Arg
  VARIANT 3: Xaa = Ala or Asp or Glu
  VARIANT 6: Xaa = Met or Leu or Ile
  VARIANT 9: Xaa = Ile or Leu
  VARIANT 10: Xaa = Trp or Phe
  VARIANT 16: Xaa = Met or Ile
  VARIANT 17: Xaa = Val or Met or Ile
HXXGHXPYXXQGALSXX

SEQ ID NO: 190 - protein, 15 aa, Artificial Sequence
  Synthetic Construct
  VARIANT 1: Xaa = Asn or Pro
  VARIANT 2: Xaa = Pro or Ser
  VARIANT 3: Xaa = Leu or Lys or Thr or Ser
  VARIANT 5,6: Xaa = Arg or Lys
  VARIANT 7: Xaa = Asn or Ser or Pro
  VARIANT 8: Xaa = Thr or Ser or Asn
  VARIANT 9: Xaa = Glu or Asp or Ser or Thr
  VARIANT 10,11: Xaa = Any Amino Acid
  VARIANT 12: Xaa = Val or Ile or Ala or Thr
  VARIANT 13: Xaa = Asp or Glu
XXXKXXXXXXXXXYP

SEQ ID NO: 191 - protein, 11 aa, Artificial Sequence
  Synthetic Construct
  VARIANT 2: Xaa = Gly or Thr or Ser or Val or Asn
  VARIANT 3: Xaa = Phe or Leu or Ile
  VARIANT 5: Xaa = Thr or Ser
  VARIANT 7: Xaa = Ser or Asn or Val or Ala or Thr
  VARIANT 8: Xaa = Ala or Asn or Ser
  VARIANT 9: Xaa = Gln or Thr or Pro
  VARIANT 10: Xaa = Pro or Ala
  VARIANT 11: Xaa = Thr or Ser
GXXGXWXXXXX

SEQ ID NO: 192 - protein, 8 aa, Artificial Sequence
  Synthetic Construct
  VARIANT 2: Xaa = Asn or His
  VARIANT 3: Xaa = Leu or Met
  VARIANT 4: Xaa = Ser or Thr
  VARIANT 5: Xaa = Gln or Pro
  VARIANT 6: Xaa = Ser or Thr or Pro
  VARIANT 7: Xaa = Ser or Pro
  VARIANT 8: Xaa = Asp or Glu
RXXXXXXX

SEQ ID NO: 193 - protein, 696 aa, Gibberella zeae; identical to SEQ ID NO: 29

SEQ ID NO: 194 - protein, 699 aa, Nectria haematococca; identical to SEQ ID NO: 34

SEQ ID NO: 195 - protein, 677 aa, Neurospora tetrasperma; identical to SEQ ID NO: 48

SEQ ID NO: 196 - protein, 710 aa, Sordaria macrospora; identical to SEQ ID NO: 42

SEQ ID NO: 197 - protein, 704 aa, Chaetomium globosum; identical to SEQ ID NO: 28

SEQ ID NO: 198 - protein, 706 aa, Podospora anserina; identical to SEQ ID NO: 38

SEQ ID NO: 199 - protein, 517 aa, Verticillium albo-atrum; identical to SEQ ID NO: 44

SEQ ID NO: 200 - protein, 692 aa, Glomerella graminicola; identical to SEQ ID NO: 30

SEQ ID NO: 201 - protein, 682 aa, Metarhizium anisopliae; identical to SEQ ID NO: 47

SEQ ID NO: 202 - protein, 535 aa, Botryotinia fuckeliana; identical to SEQ ID NO: 27

SEQ ID NO: 203 - protein, 688 aa, Sclerotinia sclerotiorum; identical to SEQ ID NO: 41

SEQ ID NO: 204 - protein, 696 aa, Grosmannia clavigera; identical to SEQ ID NO: 31

SEQ ID NO: 205 - protein, 632 aa, Aspergillus nidulans; identical to SEQ ID NO: 24

SEQ ID NO: 206 - protein, 633 aa, Aspergillus fumigatus; identical to SEQ ID NO: 23

SEQ ID NO: 207 - protein, 638 aa, Aspergillus oryzae; identical to SEQ ID NO: 18

SEQ ID NO: 208 - protein, 671 aa, Penicillium chrysogenum; identical to SEQ ID NO: 36
  VARIANT 58: Xaa = Any Amino Acid

SEQ ID NO: 209 - protein, 651 aa, Aspergillus niger; identical to SEQ ID NO: 17

SEQ ID NO: 210 - protein, 712 aa, Pyrenophora teres; identical to SEQ ID NO: 39

SEQ ID NO: 211 - protein, 710 aa, Leptosphaeria maculans; identical to SEQ ID NO: 32

SEQ ID NO: 212 - protein, 603 aa, Talaromyces stipitatus; identical to SEQ ID NO: 46

SEQ ID NO: 213 - protein, 551 aa, Neurospora crassa
MAMENDTSSGPSRKRLRTSHACDLCRFRKIRCDGDTPCAACVATENDCTYGSEANSSSHHVLSSAVGSSVGRGSFSGGSLTDLRITPRPTLCPHPDELDNANNLENAVLESRHTSTTESILQWPHFDVFPSLRKDYTSIFHLEQSRPRIKTKKRDIYPYMTEEEVDSILDAFGHAVNFWYPTTSSDQLHNARALITNGNFEDNDELCVCLALLVMALGCASKVTAGLMESAAVPESEQRRRATYRATGDMYFESALKKLYVAHMDVSSIATQCLFFVALYFAFLRRPLQAWEYISAAATKCLLLLSYSSQDSTSEDQERIRRIFWSCYILESDYLAELSNLPLSGIARVESSVPLPDAWYSTHSNAQEEEQSSLYFLACISMRRLLNRVHQLLYARGTGASLDDKRFPGIVKELDHQLDEWRTVLPEAFAFEVEWPPVGAKHNITGVKTEHGGFLRQRYLTCRSVIYRPMAGAMLVLLAACRISLLKDLIGPEILQAGSHLRELLVGWQKVQGDPSSPSVNQSIHIIKEAERFIRQVYKGGKDEEQGRIEE

SEQ ID NO: 214 - protein, 704 aa, Aspergillus nidulans; identical to SEQ ID NO: 67

SEQ ID NO: 215 - protein, 745 aa, Penicillium marneffei; identical to SEQ ID NO: 91

SEQ ID NO: 216 - protein, 749 aa, Talaromyces stipitatus; identical to SEQ ID NO: 89

SEQ ID NO: 217 - protein, 773 aa, Aspergillus nidulans; identical to SEQ ID NO: 85

SEQ ID NO: 218 - protein, 777 aa, Aspergillus niger; identical to SEQ ID NO: 80

SEQ ID NO: 219 - protein, 771 aa, Aspergillus oryzae; identical to SEQ ID NO: 82

SEQ ID NO: 220 - protein, 767 aa, Penicillium chrysogenum; identical to SEQ ID NO: 83

SEQ ID NO: 221 - protein, 757 aa, Coccidioides immitis; identical to SEQ ID NO: 87

SEQ ID NO: 222 - protein, 794 aa, Coccidioides posadasii; identical to SEQ ID NO: 86

SEQ ID NO: 223 - protein, 834 aa, Neurospora tetrasperma; identical to SEQ ID NO: 96

SEQ ID NO: 224 - protein, 803 aa, Sordaria macrospora; identical to SEQ ID NO: 70

SEQ ID NO: 225 - protein, 792 aa, Podospora anserina
NMAPSIPVPTQGGMFHTFQGVTPRKQSTDSQDSTKTSSTGTAKRITTPHACAECKRRKIRCDGQQPCGQCLSSRAPKRCFYDKHRQRVIPSRKTLEALSQSLEECRSILKRLYPTQDVQSLLPLSRQELLSLLDRPTIDTSVGGLPSPPLNTSPMSDLDSPMMPKTENLLEQMPSRDTEWDEERRGRDPIPAEADDINALSLSVDRQTSYLGASSIKAALMVMLKVQPGLRNSLAAPLNGVEMSHNYPAIRQKPTTQKDPQRIPWSWKGQTLIDAYFKRIHAFVPMLDESTFRADYLEGQRTDAPWLALLNMVFAMGSIAAMKSDDYNHINYYNRAMEHLPMDAFGSSHIETVQALALIGGYYLHYINRPNMANAVLGAAIRMASALGLHRESITVGLPGSDIIAAETRRRTWWSLFCLDTWATTTMGRPSFGRWGPAINIRPPEFGINANRDSSQHAGILPLIENIKFCKIATQIQDMLAITPLLRTEDRCAIDAQLVNWYTSLPWLLRTTDPCAEPLYMARCIMKWRYQNLRMLLHRPVLLSLASSGLNPHTQACDADLQAIETCRELAAATIEDVGREWTRNQMSGWNAVWFLYQAAMVPLVSVFWQWGSPRVPEWLKQIEQVLDLLEVMEEWSLAARRSREVVWRMYEASRAVQAQGAAARSQSPAGLHITTTADSIVVGGGEVHMSPIGLEPVDGMGGMMGLLDQGGLWDLDGMYWGGNGPQSPTHTGNPDDSAAAAEFAAYAAAQQAASAAHHHHPELMQHVDYGMMHHHHAGHHHVGMEGFGYVQ

SEQ ID NO: 226 - protein, 751 aa, Glomerella graminicola; identical to SEQ ID NO: 73

SEQ ID NO: 227 - protein, 781 aa, Magnaporthe oryzae; identical to SEQ ID NO: 74

SEQ ID NO: 228 - protein, 647 aa, Nectria haematococca; identical to SEQ ID NO: 76

SEQ ID NO: 229 - protein, 608 aa, Trichoderma reesei; identical to SEQ ID NO: 94

SEQ ID NO: 230 - protein, 829 aa, Verticillium albo-atrum; identical to SEQ ID NO: 75

SEQ ID NO: 231 - protein, 642 aa, Pyrenophora tritici-repentis; identical to SEQ ID NO: 90

SEQ ID NO: 232 - protein, 787 aa, Pyrenophora teres; identical to SEQ ID NO: 78

SEQ ID NO: 233 - protein, 788 aa, Leptosphaeria maculans
DFDTSSCSTSQHDMFHTFQSSAAMRSPDADIDASGKPSRPPGSRRISTSNACVECRRRKIRCDGSQPCGQCQWYQHPEACGYSKPAQRVVPSRKLVDKLSNNIEQYKAVLTKLYGGRNLESLANLPREELLELALSSPSITLTTSPSTTESVALSDVQAGSDGAESLEALEQAPPEDPYWDEARKHQLRVQGISDDVNGLSMSVDRLSSYVGISSITAALKVIVRCAPQARLLIAHNSQETALPSRAGSPPPELADNNPLAVPSAQHGQQLIEAFFDRVHPFFPMIDERKFWNTYLYGDRKDSAWLGLLNTVFALGSLSSSTADNEAHYVYFTRARQHVSLESFGSGNLEVLQTLAIMSGYYMHYLNRPNEAHSLMGGTLRMATALGLHREYSERSGSSRKFTAAGEEDSISPEMRRRIWWSLFCLDSWASTTTGRPSLGRMGPSITVMRPGTAPNAVQTIPPPDSPQYIEQLKILPLIHASAFCQIATRIQDRLVETPLLSLAETAAFDMQILKWHEELPSILSDLNEPCPDFLRRVRTVMKWRFQNIRLVLHRPVLLTTALRRSSWNSLSPEEKVAVGKCRMIAAKTIQELSKECMADLISGWNAVWFCFQACMVPLVSLFSDCSIPEEVKKWNESLETALQFFETAKDWSIAAKRSGDAVTRLYAAYKTYASTMLSQPQAPMQTVQPHYQDSNNFALPGTVTTSSMLNTHQIYSQAQPAFQYNPSTPTWANANDPTILNNLWDDMMWDTNLPDMLETPFGLNNDWEYASTAQDSGSGGACWMHGN

SEQ ID NO: 234 - protein, 768 aa, Neurospora crassa; identical to SEQ ID NO: 95

SEQ ID NO: 235 - protein, 32 aa, Artificial Sequence
  Synthetic Construct
CEVCRSRKSRCDGTKPKCKLCTELGAECIYRE

SEQ ID NO: 236 - protein, 38 aa, Artificial Sequence
  Synthetic Construct
  VARIANT 21,24,34: Xaa = Any Amino Acid
CAECRRRKIRCDGEQPCGQCXWYXKPKRCFYRVXPSRK

SEQ ID NO: 237 - protein, 259 aa, Artificial Sequence
  Synthetic Construct
  VARIANT 62,76,84,133,183,189,195: Xaa = Any Amino Acid
IEAYFERVNVWYACVNPYTWRSHYRTALSNGFREGPESCIVLLVLALGQASLRGSISRIVPXEDPPGLQYFTAAWXLLPGMMTXNSVLAAQCHLLAAAYLFYLVRPLEAWNLLCTTSTKLQLLLMAPNRVPPXQRELSERIYWNALLFESDLLAELDLPHSGIVQFEENVGLPGGFEGEEDEXDEEADXDQEIAXVTAVGRDELWYFLAEIALRRLLNRVSQLIYSKDTPYSKGPSMASTTSLEPIVAELDFQLTQWYE

SEQ ID NO: 238 - protein, 171 aa, Artificial Sequence
  Synthetic Construct
  VARIANT 10,12,18,58,59,69,78,100,125,126,135,138,167: Xaa = Any Amino Acid
IDAYFKRVHXFXPMLDEXTFRATYLEGQRKDAPWLALLNMVFALGSIAAMKSDDYNHXXYYNRAMEHLXLDSFGSSHXETVQALALMGGYYLHYINRPNXANALMGAALRMASALGLHRESLAQXXASSQKGVNXSDXASAETRRRTWWSLFCLDTWATTTLGRPSXGRWG
